(19) United States
(12) Patent Application Publication
(10) Pub. No.: US 2008/0318803 A1
(43) Pub. Date: Dec. 25, 2008

(54) Biomarkers for Monitoring Impdh Pathway Inhibition

(75) Inventors: Jugnu Jain, Natick, MA (US); Matthew W. Harding, Acton, MA (US); Ravi Ramachandran, Acton, MA (US); Martyn Botfield, Boston, MA (US)

Correspondence Address: MARSHALL, GERSTEIN & BORUN LLP, 233 S. WACKER DRIVE, SUITE 6300, SEARS TOWER, CHICAGO, IL, 60606, US

(73) Assignee: VERTEX PHARMACEUTICALS, Cambridge, MA (US)

(21) Appl. No.: 11/597,464

(22) PCT Filed: May 27, 2005
(86) PCT No.: PCT/US05/18551

§ 371 Date: Sep. 28, 2007

Related U.S. Application Data
(60) Provisional application No. 60/575,076, filed on May 27, 2004.

(51) Int. Cl. C40B 30/06; C40B 40/08; C07H 21/00

(52) U.S. Cl. 506/10; 506/17; 536/24.3

(57) ABSTRACT

The present invention is directed to methods for ameliorating reproductive disorders. More specifically, the present invention describes methods and compositions for using IL-17 in the treatment of various infertility-related defects.

[0001] The present application claims the benefit of priority of 60/575,076 filed on May 27, 2004. The entire text of this priority application and its appendices is incorporated herein by reference.

### FIELD OF THE INVENTION

[0002] The present invention relates to biomarkers useful for monitoring the effects of inhibition of IMPDH in a patient.

### BACKGROUND

[0003] The synthesis of nucleotides in organisms is required for the cells in those organisms to divide and replicate. Nucleotide synthesis in mammals may be achieved through one of two pathways: the de novo synthesis pathway or the salvage pathway. Different cell types use these pathways to a different extent.

[0004] Inosine-5′-monophosphate dehydrogenase (IMPDH; EC 1.1.1.205) is an enzyme involved in the de novo synthesis of guanine nucleotides. IMPDH catalyzes the NAD-dependent oxidation of inosine-5′-monophosphate (IMP) to xanthosine-5′-monophosphate (XMP) [Jackson R. C. et. al., Nature, 256, pp. 331-333, (1975)].

[0005] IMPDH is ubiquitous in eukaryotes, bacteria and protozoa [Y. Natsumeda & S. F. Carr, Ann. N.Y. Acad., 696, pp. 88-93 (1993)]. The prokaryotic forms share 30-40% sequence identity with the human enzyme. Two isoforms of human IMPDH, designated type I and type II, have been identified and sequenced [F. R. Collart and E. Huberman, J. Biol. Chem., 263, pp. 15769-15772, (1988); Y. Natsumeda et. al., J. Biol. Chem., 265, pp. 5292-5295, (1990)]. Each is 514 amino acids, and they share 84% sequence identity. Both IMPDH type I and type II form active tetramers in solution, with subunit molecular weights of 56 kDa [Y. Yamada et. al., Biochemistry, 27, pp. 2737-2745 (1988)].

[0006] The de novo synthesis of guanosine nucleotides, and thus the activity of IMPDH, is particularly important in B and T-lymphocytes. These cells depend on the de novo, rather than salvage pathway to generate sufficient levels of nucleotides necessary to initiate a proliferative response to mitogen or antigen [A. C. Allison et. al., Lancet II, 1179, (1975) and A. C. Allison et. al., Ciba Found. Symp., 48, 207, (1977)]. Thus, IMPDH is an attractive target for selectively inhibiting the immune system without also inhibiting the proliferation of other cells. Although resting lymphocytes can utilize the alternate salvage nucleotide synthesis pathway (Fairbanks et al, 1995), rapidly proliferating lymphocytes rely predominantly on the de novo pathway for satisfying their requirement for nucleotides. This observation makes enzymes of the de novo pathway attractive targets for pharmacological intervention aimed at inhibiting lymphocyte proliferation (Allison and Eugui, 2000). Blocking IMPDH enzyme activity results in a decrease of cellular guanine nucleotide levels, thereby inhibiting DNA and RNA synthesis, resulting ultimately in antiproliferative, immunosuppressive and antiviral effects (reviewed in Franchetti and Grifantini, 1999).

[0007] It is also known that IMPDH plays a role in other metabolic events. Increased IMPDH activity has been observed in rapidly proliferating human leukemia cell lines and other tumor cell lines, indicating IMPDH as a target for anti-cancer as well as immunosuppressive chemotherapy [M. Nagai et. al., Cancer Res., 51, pp. 3886-3890, (1991)].

[0008] Inhibitors of IMPDH have been extensively investigated to treat various diseases, e.g., tumors and cancers, immunosuppression, and viral diseases, See, e.g., WO 00/56331. Mycophenolic acid (“MPA”) and VX-944 are two known IMPDH inhibitors. VX-944 is currently being investigated for potential use as an anti-cancer agent. Several IMPDH inhibitors have been used clinically and more are being developed for the treatment of immune cell-mediated, chronic inflammatory, antineoplatic and antiviral indications (Jain et al, 2001, Jain et al, 2002, Dhar et al, 2002). In addition, several new, non-nucleoside IMPDH inhibitors have been designed using a rational drug design approach (Sintchak et al, 1996, reviewed in Saunders and Raybuck, 2000). Of these, VX-497, is currently being investigated in a Phase II trial in combination with pegylated IFN and ribavirin for the treatment of Hepatitis C (Markland et al, 2000, Jain et al, 2001). VX-944 inhibits both IMPDH isozymes with Ki values of 7-10 nM (Jain et al, 2003, ASH poster). VX-944 is also very potent in inhibiting the proliferation of human peripheral lymphocytes stimulated with either T or B-cell mitogens with IC50 values ranging from 20-100 nM, and is more potent than VX-497 or MPA (Eugui et al, 1991a, Jain et al, 2001, Jain et al, 2003 ASH poster, Jain et al, 2004 ASH poster). The inhibition of lymphocyte proliferation by VX-944 is alleviated by the addition of 50 μM guanosine, demonstrating its specificity towards the IMPDH enzyme.

[0009] There is a need to develop a reliable biomarker that can be readily used for tracking and monitoring the efficacy of such an IMPDH inhibitor. Such a biomarker should be sensitive to inhibition of IMPDH and be readily detectable by methods that are not unduly burdensome.

### SUMMARY OF THE INVENTION

[0010] The present invention provides biomarkers that are useful in monitoring the effect of inhibition of IMPDH in a patient. Applicants have identified a group of genes that are up- or downregulated as a result of IMPDH inhibition. Exemplary expression data showing genes that are up- or down-regulated in response to IMPDH inhibition after 24, 48 and 72 hours of exposure to exemplary IMPDH inhibitors are provided in Table IX. Determining the expression of these genes in a biological sample obtained from a subject treated with an IMPDH inhibitor will therefore allow an assessment of whether the individual will be responsive to IMPDH inhibitor therapy.

[0011] The invention describes a nucleic acid array consisting essentially of at least 4 polynucleotides selected from the polynucleotides listed in any one or more of Tables I through VIII, wherein said polynucleotides are immobilized on a solid surface, and wherein said array further contains one or more calibration points and one or more housekeeping genes. In some embodiments the nucleic acid array consists of at least 4 polynucleotides selected from the polynucleotides listed in any one or more of Tables I through VIII. The array may have between 1 and 10 calibration spots and also or alternatively may have between 1 to 10 housekeeping genes to serve as controls for the array. The polynucleotides may be cDNAs or oligonucleotides. The arrays may consist of at least 4, 5, 10, 15, 20, 25, 30, 35, 40, 50, 60, 70, 80, 90, 100, 110, 120, 130, 140, 150, 200, 300 or more polynucleotides. The polynucleotides may be preferred polynucleotides presented herein in Tables I through Table VIII or alternatively may be fragments or variants of those polynucleotides. In one preferred aspect the microarray is one which comprises all of the polynucleotides set forth in Table VI. Another preferred microarray contains all of the polynucleotides set forth in Table V. Another preferred microarray contains all of the polynucleotides set forth in Table IV. In preferred embodiments, the array contains more than one polynucleotide hybridizing to the same gene.

[0012] Also encompassed by the invention is a nucleic acid array consisting essentially of at least 4 distinct nucleic acid sequences selected from the group consisting of the polynucleotides listed in Table I, immobilized on the surface at discrete and known positions, wherein said nucleic acids hybridize to nucleic acids in a sample of a subject that are either up-regulated or down-regulated in response to inhibition of IMPDH. In other embodiments, there is provided a nucleic acid array consisting of at least 4 distinct nucleic acid sequences selected from the group consisting of the polynucleotides listed in Table I. Another embodiment is directed to a nucleic acid array consisting essentially of at least 4 distinct nucleic acid sequences selected from the group consisting of the polynucleotides listed in Table IV, immobilized on the surface at discrete and known positions, wherein said nucleic acids hybridize to nucleic acids in a sample of a subject that are either up-regulated or down-regulated in response to inhibition of IMPDH. Another embodiment is directed to a nucleic acid array consisting of at least 4 distinct nucleic acid sequences selected from the group consisting of the polynucleotides listed in Table IV. Still more preferably, the nucleic acids on said microarray are selected from the group consisting, or consisting essentially, of the genes from Table V. Alternatively, the nucleic acids on said microarray are selected from the group consisting, or consisting essentially, of the genes from Table VI.

[0013] Other exemplary nucleic acid arrays are those that consist, or consist essentially, of at least 4 distinct nucleic acid sequences selected from the group consisting of the polynucleotides listed in Table VII, immobilized on the surface at discrete and known positions, wherein said nucleic acids hybridize to nucleic acids in a sample of a subject that are either up-regulated or down-regulated in response to inhibition of IMPDH. In the arrays the surface is typically selected from the group consisting of a metal, silicon, a polymer plastic, paper, ceramic, quartz, gallium arsenide, metal, metalloid, cellulose, celluose acetate, nitrocellulose, and a glass. More specifically, the plastic is selected from the group consisting of nylon, polycarbonate, polyethylene, polystyrene, teflon, polypropylene, poly(4-methylbutene), polystyrene/latex, polymethacrylate, poly(ethylene terephthalate), rayon, polyvinylbutyrate, and polyvinylidene difluoride. Preferably, the arrays have at least one control spot consisting of one or more nucleic acids that are known not to be modulated with IMPDH inhibition.

[0014] In specific embodiments the array surface comprises a plurality of microarrays separated from each other with a hydrophobic polymer strip. In preferred aspects the hydrophobic polymer strip is selected from the group of polyethylene, silicone, paraffin, and Teflon®.

[0015] Also contemplated by the invention is a set of polynucleotides for use in the detection of IMPDH inhibition, wherein said polynucleotides hybridize to 4 to 314 genes selected from the group consisting of the genes set forth in any one or more of Table I, Table II, Table III, Table IV, Table V, Table VI, Table VII and Table VIII wherein the expression of each said nucleic acid is either up- or down-regulated in response to inhibition of IMPDH.

[0016] Another aspect of the invention is related to a set of polynucleotides for use in the prediction of efficacy of an IMPDH inhibitor in non-proliferating cells, wherein the set of polynucleotides hybridize to 4 to 38 genes selected from the group consisting of the genes set forth in Table I. Still another aspect is directed to a set of polynucleotides for use in the prediction of efficacy of an IMPDH inhibitor in a proliferating cell, wherein the set of polynucleotides hybridize to 4 to 300 genes selected from the group consisting of the genes set forth in Table II, Table III, and Table IV. Preferably, the proliferating cell is from a hematological cancer and said genes are selected from the group of genes set forth in Table V. Alternatively, the genes are selected from the group of genes set forth in Table VI.

[0017] Also part of this invention is a set of nucleic acids for use in the prediction of anti-viral efficacy of an IMPDH inhibitor, wherein the set of polynucleotides hybridize to 4 to 9 genes selected from the group consisting of the genes set forth in Table VII. These are not the only genes identified that may predict antiviral activity of VX-944. The genes listed in Table VII are from the intersection of the genes of Table I and IFN-responsive genes. The skilled person may identify additional anti-viral genes by obtaining the intersection between Table IV and IFN-responsive genes.

[0018] Another aspect of the invention is a set of nucleic acids for use in the prediction of efficacy of an IMPDH inhibitor as an anti-cancer agent, wherein the set of polynucleotides hybridize to the 4 genes set forth in Table VIII.

[0019] The invention specifically contemplates a method for predicting whether a candidate IMPDH inhibitory agent will produce a therapeutic effect in a subject comprising: contacting a biological sample with said inhibitory agent and determining the expression level of four or more prognostic genes selected from the group consisting of the genes set forth in one or more of Gene Table I, Gene Table II, Gene Table III, Gene Table IV, Gene Table V, Gene Table VI, Gene Table VII and Gene Table VIII in said biological sample, wherein a modulation of the expression level of four or more of genes similar to the modulation resulting from a known IMPDH inhibitor is indicative that said agent is a therapeutically effective IMPDH inhibitory agent.

[0020] A candidate IMPDH inhibitor produces an expression pattern that is “similar” to a known IMPDH inhibitor, e.g., VX-944 or MPA, if the qualitative, but not necessarily quantitative, effect on gene expression of the candidate and known inhibitors reliably resemble or mimic each other from the perspective of one of skill in the art. The qualitative effect on expression (i.e., the number of genes exhibiting modulated expression and whether that modulation reflects up- or down-regulation) is distinct from the quantitative effect on expression (i.e., the magnitude of a given change in expression). Preferably, a candidate IMPDH inhibitor is identified as producing an expression pattern similar to a known IMPDH inhibitor if the two modulators exert the same qualitative effect (i.e., up-regulated or down-regulated) on a percentage of the modulated genes that is at least 50%, 60%, 70%, 75%, 80%, 90%, 95% or 99%.

[0021] Preferably, the effect is a clinical response. More particularly, the subject is a mammal, more specifically a human patient. The response also may be monitored in vitro in tissues or cells lines from a cancer patient. In the methods described herein the biological sample is preferably a sample from a cancer patient, and wherein said cancer is selected from the group consisting of myeloproliferative diseases, leukemia, breast cancer, ovarian cancer, gastric cancer, colorectal cancer, prostate cancer; pancreatic cancer, lung cancer, etc. The methods are such that the alteration of expression in response to said IMPDH inhibitory agent is preferably similar to the alteration in expression seen in response to administration of VX-944.

[0022] Preferably, the subject is a human patient. Or human cell lines or tissues or cells derived from cancers. More preferably, the subject is one who is suffering form a proliferative disorder. Where the proliferative disorder is cancer, the biological sample is a sample from a cancer patient, wherein said cancer is selected from the group consisting of myeloproliferative diseases, leukemia, breast cancer, ovarian cancer, gastric cancer, colorectal cancer, prostate cancer; pancreatic cancer, lung cancer, etc. The method may involve comparing the alteration of expression in response to said IMPDH agent to the level of alteration in expression seen in response to administration of VX-944.

[0023] Preferably, the sample is a tissue sample comprising cancer cells. The tissue or cells may be fixed, paraffin-embedded, fresh, or frozen. Preferably, the tissue is obtained through a biopsy, such as for example, a fine needle aspiration, bronchial lavage, or transbronchial biopsy. In specific embodiments, the expression level of said prognostic RNA transcript or transcripts is determined by PCR, immunohistochemistry, in situ hybridization, and the like. The assay for the measurement of said prognostic RNA transcripts or their expression products is provided in the form of a kit or kits.

[0024] Also contemplated is a method of preparing a prognostic profile for a subject's response to an IMPDH inhibitor comprising the steps of exposing ex vivo cells of said subject to an IMPDH inhibitor, subjecting RNA extracted from the cells of step (a) to gene expression profiling; determining the expression level of at least four genes selected from the group consisting of the genes set forth in Table I, Table II, Table III, Table IV, Table V, Table VI, Table VII and Table VIII in said cells; and comparing the expression levels obtained in step (c) to expression levels obtained in the absence of said IMPDH inhibitor, wherein a modulation of the expression level of said four or more of genes in response to said IMPDH inhibitor indicates that said subject is likely to be responsive to said inhibitor.

[0025] Also contemplated is a method of preparing a prognostic profile for a subject's response to an IMPDH inhibitor comprising the steps of administering to said subject to an IMPDH inhibitor; subjecting RNA extracted from the cells of said subject to gene expression profiling; determining the expression level of at least four genes selected from the group consisting of the genes set forth in Table I, Table II, Table III, Table IV, Table V, Table VI, Table VII and Table VIII in said cells of said subject; and comparing the expression levels obtained in step (c) to expression levels obtained in the absence of said administration of said IMPDH inhibitor, wherein a modulation of the expression level of said four or more of genes in response to said IMPDH inhibitor administration indicates that said IMPDH inhibitor will likely predict the subject's response to said IMPDH inhibitor administration. These methods can be used to monitor a response such as a therapeutic response, toxicity, dose range, and patient stratification.

[0026] In these methods, the cells may be cancer cells, e.g., cells selected from the group consisting of breast cancer, ovarian cancer, hematological cancer, gastric cancer, colorectal cancer, pancreatic cancer, and lung cancer. The cells can be fixed or may be from a fresh biopsy or may be from a cancer cell culture. In preferred embodiments, the cancer cells are cultured ex vivo. In the above methods the expression profile may be compiled into a report that includes recommendation for a treatment for said subject with an IMPDH inhibitor. In further embodiments, if altered expression of one or more of the genes selected from the genes set forth in Tables I, II, III, IV, V, VI, VII, and VIII, or the corresponding expression product is determined, said report includes a prediction that said subject is a suitable candidate for IMPDH inhibition-based therapy. In certain embodiments, the method may further comprise treating said patient with an IMPDH inhibitory agent. The biological sample used may be a blood sample, a tissue biopsy, or a tumor cell isolated from a tumor biopsy. The subset of genes could also be useful in conducting animal models or defining biomarkers in animal models used to determine efficacy or PK-PD correlation for IMPDH inhibitors.

[0027] The treatment method is one in which subject has been treated with any IMPDH inhibitor. In this regard, several IMPDH inhibitors have been used clinically and more are being developed for the treatment of immune cell-mediated, chronic inflammatory, antineoplatic and antiviral indications (Jain et al, 2001, Jain et al, 2002, Dhar et al, 2002). Mycophenolic acid (MPA), has been demonstrated to inhibit the proliferation of lymphocytes in vitro and in vivo (Eugui et al, 1991a, Allison and Eugui, 2000). An ester pro-drug of MPA, mycophenolate mofetil (CellCept®) is prescribed for the prevention of acute rejection in kidney, heart and liver transplantation (reviewed in Mele and Halloran, 2000), in combination with steroids and cyclosporine A (CsA). Mizoribine (Bredinin®) and ribavirin (Virazole®, Rebetol®) are nucleoside analogs which following intracellular phosphorylation are competitive IMPDH inhibitors (Franchetti and Grifantini, 1999, Saunders and Raybuck, 2000). Mizoribine is approved in Japan for multiple indications including prevention of rejection after renal transplantation, idiopathic glomerulonephritis, lupus nephritis, and rheumatoid arthritis (Ishikawa 1999). Ribavirin is used extensively as an inhaled antiviral agent for treatment of respiratory syncytial virus (RSV) and, orally in combination with interferon-a, for the treatment of chronic hepatitis C viral (HCV) infection (Davis et al 1998, McHutchison et al, 1998, Poynard et al 1998). Antineoplastic and antiviral activities of other nucleoside and NAD analogs, such as tiazofurin for the treatment of CML (reviewed in Jayaram et al, 1999), have been described but these are not yet clinically approved (reviewed in Saunders and Raybuck, 2000). The diverse therapeutic indications for these and other IMPDH inhibitors that are being developed illustrate the unmet clinical need for potent, reversible and lymphocyte-selective inhibitors that are safe, well-tolerated, and suitable for long-term dosing. The methods of the invention will facilitate such evaluations.

[0028] Also part of the invention are kits which comprise the nucleic acid arrays described herein in combination with appropriate containers, buffers, reagents and instructions for use in diagnostic and/or therapeutic methods. Such kits may further comprise nucleic acids of a reference subject as calibration standards. Further, the kits also may comprise detectable labels for the compositions of the invention.

[0029] Other features and advantages of the invention will become apparent from the following detailed description. It should be understood, however, that the detailed description and the specific examples, while indicating preferred embodiments of the invention, are given by way of illustration only, because various changes and modifications within the spirit and scope of the invention will become apparent to those skilled in the art from this detailed description.

### BRIEF DESCRIPTION OF THE DRAWING(S)

[0030] The following drawings form part of the present specification and are included to further illustrate aspects of the present invention. The invention may be better understood by reference to the drawings in combination with the detailed description of the specific embodiments presented herein.

[0031] FIG. 1 shows treatment comparisons in which it is observed that there are differences in gene expression (scatter) enhanced at 30 h compared to the 14 h time-point for VX-944 and Mycophenolic acid (MPA).

[0032] FIGS. 2A-2C provides % cv's for certain genes for various treatment groups (n=3). There is a heirarchical clustering of certain transcript profiles (data not shown).

[0033] FIG. 3 shows exemplary genes co-regulated by VX-944 and MPA.

[0034] FIG. 4 shows exemplary genes down-regulated by VX-944 at various time points of exposure.

[0035] FIG. 5 shows exemplary genes upregulated by MPA at various time points of exposure.

[0036] FIG. 6 shows additional exemplary genes upregulated by VX-944 at various time points of exposure.

[0037] FIG. 7 shows exemplary genes upregulated by both VX-944 and MPA at various time points of exposure.

[0038] FIG. 8 shows exemplary biomarkers of IMPDH inhibition.

[0039] FIG. 9 shows exemplary biomarkers of IMPDH inhibition segregated according to early and late biomarkers.

[0040] FIG. 10 shows QRT-PCR data that validates the data obtained using the gene chip data disclosed. These data were generated using expression patterns, impact of the inhibitors on specific pathways, high dynamic range, mechanistic relevance and cancer patient literature to select that candidate biomarker panel that will be useful. From these studies IL1RN (Interleukin 1 receptor antagonist), SPP1 (Secreted phosphoprotein 1), NCF1 (Autosomal chronic granulomatous disease-associated gene) and BCL2 (B-cell CLL/lymphoma 2—Anti-apoptosis marker) were selected as suitable candidate markers for IMPDH inhibition in HL-60 cells.

[0041] FIG. 11 shows that candidate marker responses to VX-944 can be monitored in human PBMCs. The same markers discussed above were used in the studies shown in this figure.

### DETAILED DESCRIPTION OF THE PREFERRED EMBODIMENTS OF THE INVENTION

[0042] Traditional therapeutic monitoring of drugs involves the measurement of drug concentrations in patient blood. Several biochemical approaches to measure the biological effect of MPA or MMF (Langman et al 1995, Langman et al 1996, Griesmacher et al, 1997, Gummert et al, 1999, Albrecht et al, 2000, Budde et al, 2000, Qiu et al, 2000, Daxecker et al, 2001), mizoribine (Hirohata and Yamagida, 1995), and ribavirin (Fairbanks et al, 1995, Montero et al, 1995) have been described. In the present invention, the inventors have evaluated gene expression changes in response to VX-944 as an example of a potent and specific IMPDH inhibitor. MPA, a structurally unrelated but mechanistically similar IMPDH inhibitor, was included in some studies to compare its effect with VX-944. Given the similar mechanism of action of the two compounds, genes affected by both VX-944 and MPA are more likely to represent biomarkers for IMPDH inhibition. These results will be valuable in optimizing the dosing regimen and therapeutic benefit of IMPDH-based therapies in a broad range of therapeutic indication. Monitoring these patterns of gene expression changes are also likely to be predictive of a beneficial outcome with other unknown IMPDH pathway inhibitors. The gene expression changes observed with VX-944 and MPA may also allow selection of drugs that may enhance the effect of IMPDH inhibitors in combination treatments. Examples of gene expression changes have been published for Gleevec/STI-571. Based on the two compounds targeting two complementary pathways, we predict that a combination of the two agents is likely to be synergisitic in treating cancer.

[0043] The present invention is directed to methods and compositions for using biomarkers that are responsive to changes in IMPDH activity levels. More particularly, in certain preferred embodiments, the invention is directed to biomarkers that are responsive to IMPDH inhibition. In preferred aspects of the present invention there are provided nucleic acid arrays or sets of nucleic acids that are specifically up-regulated or down-regulated in response to IMPDH inhibition. Having identified these specific nucleic acids, it is now possible to prepare microarrays and specific collections of nucleic acids that may be used in order to identify additional IMPDH inhibitors, to verify that a known IMPDH inhibitor is exerting a desired effect in vitro or in vivo, and to provide a genetic profile of a subject under investigation in order to determine whether the individual is responsive to IMPDH inhibition. In one embodiment, the inventors obtained 18 gene chips that contained a total of 8793 genes on the arrays. Out of these 8793 genes there were 3421 genes that were common to all 18 gene chips. Of these, the inventors identified 1355 genes that were responsive to IMPDH inhibition. Gene sets 2 and 3 identified in the examples provided below contain the preferred subset of genes that are responsive to IMPDH inhibition. The following table summarizes the response of those genes to such inhibition and from these analyses the genes that were identified as particularly useful exemplary biomarkers for IMPDH inhibition are listed immediately beneath the table.

| | |
|---|---|
| No. genes modulated by DMSO | 32 |
| No. genes modulated by MPA | 75 |
| Increased | 39 |
| Decreased | 36 |
| No. genes modulated by VX-944 | 106 |
| Increased | 46 |
| Decreased | 60 |
| No. genes increased by both | 62 |
| No. genes decreased by both | 63 |

[0044] Of the above genes, particularly useful exemplary biomarkers include, but are not limited to: ARF4; CCNE2; CGR19; CPR8; EDF1; GTF2F1; LGALS1; PDGFC; PSMC5; PTK9; RABGGTA; SCAP2; SERPINB2; TBPL1.

[0045] Monitoring gene expression patterns offers an alternative approach for optimizing the therapeutic window as compared with the traditional method of measuring drug concentrations in blood and correlating either the AUC or Cmax levels with a clinical response. Towards that end, the inventors have comprehensively evaluated several genes affected by treatment with two distinct IMPDH inhibitors in vitro, as potential readouts for assessing their biological activity. The genes that are listed in Tables I through VIII are particularly useful in the present invention. These genes were identified using the specific methods as follows: Most cell culture reagents, unless specified otherwise, were obtained from Gibco-BRL or JRH Biologicals. Complete RPMI was prepared by adding up to a final of 10% heat-inactivated fetal bovine serum (FBS), 55 μM β mercaptoethanol, 50 units/mL penicillin with 50 μg/mL streptomycin, 300 μg/ml L-glutamine and 10 mM HEPES pH 7.5 to RPMI1640. Stock solutions of Phyto-hemagglutinin (PHA-P, Difco) was prepared in FBS-free RPMI and stored at −20° C. VX-944, and MPA (Sigma-Aldrich or Calbiochem), were dissolved in DMSO at a concentration of 20 mM and stored at −20° C.

[0046] Peripheral blood mononuclear cells (PBMCs) and T cells were isolated as follows: Human venous blood was drawn from healthy volunteers using heparin as an anti-coagulant. PBMCs were isolated from blood by centrifugation over Ficoll-paque gradient or CPT tubes (Becton-Dickinson, Calif.), using standard conditions. PBMCs were harvested, washed and resuspended in complete RPMI, counted and diluted to 1×10⁶ cells/ml.

[0047] In order to monitor PBMC proliferation assay, human PBMC derived T cells (5×10⁴ cells/well), were added to 96-well plates. PHA was added up to a final concentration of 10-20 μg/mL per well for stimulating T cells. The mitogen SPAS was used at a final concentration of 2 mg/mL. DMSO was maintained at a final concentration of 0.1%.

[0048] The methods described here are standard techniques that can be implemented at many clinical laboratories. The readouts can be adapted further for pharmacodynamic monitoring of IMPDH inhibitors in a variety of therapeutic indications, ultimately helping to optimize their therapeutic window in patients.

[0049] The methods and compositions of the present invention will typically employ, unless otherwise indicated, conventional techniques of molecular biology (including recombinant techniques), microbiology, cell biology, and biochemistry, which are within the skill of the art. Such techniques are explained fully in the literature, such as, “Molecular Cloning: A Laboratory Manual”, 3rd edition (Sambrook et al., 2000); “Oligonucleotide Synthesis” (M. J. Gait, ed., 1984); “Animal Cell Culture” (R. I. Freshney, ed., 1987); “Methods in Enzymology” (Academic Press, Inc.); “Handbook of Experimental Immunology”, 4.sup.th edition (D. M. Weir & C. C. Blackwell, eds., Blackwell Science Inc., 1987); “Gene Transfer Vectors for Mammalian Cells” (J. M. Miller & M. P. Calos, eds., 1987); “Current Protocols in Molecular Biology” (F. M. Ausubel et al., eds., 1987); “PCR: The Polymnerase Chain Reaction”, (Mullis et al., eds., 1994); ); Current Protocols in Immunology.

[0050] Exemplary aspects of the present invention will involve partial and/or complete gene expression profiling of a patient in order to assess whether the patient has or will be responsive to IMPDH inhibition. Such gene expression profiling methods include methods based on hybridization analysis of polynucleotides, methods based on sequencing of polynucleotides, and proteomics-based methods. Common methods for the quantification of mRNA expression in a sample include northern blotting and in situ hybridization (Parker & Barnes, Methods in Molecular Biology 106:247-283 (1999)); RNAse protection assays (Hod, Biotechniques 13:852-854 (1992)); and PCR-based methods, such as reverse transcription polymerase chain reaction (RT-PCR) (Weis et al., Trends in Genetics 8:263-264 (1992)). Alternatively, antibodies may be employed that can recognize specific duplexes, including DNA duplexes, RNA duplexes, and DNA-RNA hybrid duplexes or DNA-protein duplexes. Representative methods for sequencing-based gene expression analysis include Serial Analysis of Gene Expression (SAGE), and gene expression analysis by massively parallel signature sequencing (MPSS).

[0051] PCR-based methods of expression profiling include, for example, RT-PCR, differential display (Liang and Pardee, Science 257:967-971 (1992)); amplified fragment length polymorphism (iAFLP) (Kawamoto et al., Genome Res. 12:1305-1312 (1999)); BeadArray™ technology (Illumina, San Diego, Calif.; Oliphant et al., Discovery of Markers for Disease (Supplement to Biotechniques), June 2002; Ferguson et al., Analytical Chemistry 72:5618 (2000)); BeadsArray for Detection of Gene Expression (BADGE), using the commercially available Luminex¹⁰⁰ LabMAP system and multiple color-coded microspheres (Luminex Corp., Austin, Tex.) in a rapid assay for gene expression (Yang et al., Genome Res. 11:1888-1898 (2001)); high coverage expression profiling (HiCEP) analysis (Fukumura et al., Nucl. Acids. Res. 31(16) e94 (2003)), and MassARRAY-based gene expression profiling method, which employs a mass spectrometry detection system.

[0052] A TaqMan assay is used to detect and optionally measure specific sequences in Polymerase Chain Reaction (PCR) products by employing the 5′Δ3′ exonuclease activity of Taq DNA polymerase. The TaqMan probe disabled from extension at the 3′ end, consists of a site-specific sequence labeled with a fluorescent reporter dye and a fluorescent quencher dye. During PCR the TaqMan probe set are derived from the genes of Tables I through VIII hybridizes to its complementary single stranded DNA sequence within the PCR target. When amplification occurs the TaqMan probe is degraded due to the 5′→3′ exonuclease activity of Taq DNA polymerase, thereby separating the quencher from the reporter during extension. Due to the release of the quenching effect on the reporter, the fluorescence intensity of the reporter dye increases. During the entire amplification process this light emission increases exponentially, the final level being measured by spectrophotometry after termination of the PCR. Because increase of the fluorescence intensity of the reporter dye is only achieved when probe hybridization and amplification of the target sequence has occurred, the TaqMan assay offers a sensitive method to determine the presence or absence of specific sequences. Therefore, this technique is particularly useful in diagnostic applications, such as the screening of samples for the presence or incorporation of favorable traits and the detection of pathogens and diseases. The TaqMan assay allows high sample throughput because no gel-electrophoresis is required for detection. Each TaqMan® Gene Expression Assay consists minimally of two unlabeled primers and a labeled probe. A more detailed description of this technique is contained in e.g., Bustin, S A. (2000). Journal of Molecular Endocrinology, 25: 169-193.

[0053] Sample preparation for use in analysis. In order to conduct sample analysis in the above gene expression profiling methods, a sample containing target polynucleotides is provided. The samples derived from can be any source containing target polynucleotides and obtained from any bodily fluid (blood, urine, saliva, phlegm, gastric juices, etc.), cultured cells, biopsies, or other tissue preparations. In preferred embodiments the target nucleic acid is obtained from a biological sample obtained from an individual that has undergone therapy based on IMPDH inhibition. In some embodiments, the expression profile of such a patient is obtained before and after IMPDH inhibition in order to assess the change in gene expression as a result of IMPDH therapy. Such expression profiling may be ongoing throughout the IMPDH therapy in order to assess whether the inhibition is having a sustained effect throughout the therapy.

[0054] DNA or RNA can be isolated from the biological sample according to any of a number of methods well known to those of skill in the art. In certain embodiments, the nucleic acid is isolated from a variety of primary tumors, including breast, lung, colorectal, prostate, brain, liver, kidney, pancreas, spleen, thymus, testis, ovary, uterus, etc., tumor, or tumor cell lines, with pooled DNA from healthy donors. More generally, the nucleic acid is isolated from hyperproliferative cells such as those found in immune system disorders such as transplant rejection and autoimmune diseases, such as rheumatoid arthritis, multiple sclerosis, juvenile diabetes, asthma, inflammatory bowel disease, as well as in the treatment of cancer and tumors, such as lymphomas and leukemia, vascular diseases, such as restenosis, and viral replication diseases, such as retroviral diseases, hepatitis C, and herpes. If the source of mRNA is a primary tumor or primary tissue from a hyperproliferative disorder, mRNA can be extracted, for example, from frozen or archived paraffin-embedded and fixed (e.g. formalin-fixed) tissue samples. Other methods of purification of nucleic acids are described in Tijssen (1993) Laboratory Techniques in Biochemistry and Molecular Biology: Hybridization With Nucleic Acid Probes, Part I. Theory and Nucleic Acid Preparation, Elsevier, New York N.Y. For example, total RNA is can be isolated using the TRIZOL reagent (Life Technologies, Gaithersburg Md.), and mRNA is isolated using oligo d(T) column chromatography or glass beads. Alternatively, when target polynucleotides are derived from an mRNA, the target polynucleotides can be a cDNA reverse transcribed from an mRNA to generate more stable cDNAs, an RNA transcribed from that cDNA, a DNA amplified from that cDNA, an RNA transcribed from the amplified DNA, and the like. When the target polynucleotide is DNA, it can be derived from a DNA source or from an RNA source by reverse transcription. In yet another embodiment, the targets are target polynucleotides prepared by more than one method.

[0055] General methods for mRNA extraction are well known in the art and are disclosed in standard textbooks of molecular biology, including Ausubel et al., Current Protocols of Molecular Biology, John Wiley and Sons (1997). Methods for RNA extraction from paraffin embedded tissues are disclosed, for example, in Rupp and Locker, Lab Invest. 56:A67 (1987), and De Andrs et al., BioTechniques 18:42044 (1995). In particular, RNA isolation can be performed using purification kit, buffer set and protease from commercial manufacturers, such as Qiagen™, according to the manufacturer's instructions. For example, total RNA from cells in culture can be isolated using Qiagen RNeasy mini-columns. Other commercially available RNA isolation kits include MasterPure™ Complete DNA and RNA Purification Kit (EPICENTRE®, Madison, Wis.), and Paraffin Block RNA Isolation Kit, (Ambion, Inc.). Total RNA from tissue samples can be isolated using RNA Stat-60 (Tel-Test). RNA prepared from tumor can be isolated, for example, by cesium chloride density gradient centrifugation. Note that as RNA cannot serve as a template for PCR, the first step in gene expression profiling by RT-PCR is the reverse transcription of the RNA template into cDNA, followed by its exponential amplification in a PCR reaction.

[0056] When target polynucleotides are amplified it is desirable to amplify the nucleic acid sample and maintain the relative abundances of the original sample, including low abundance transcripts. Total mRNA can be amplified by reverse transcription using a reverse transcriptase and a primer consisting of oligo d(T) and a sequence encoding the phage T7 promoter to provide a single-stranded DNA template. The second DNA strand is polymerized using a DNA polymerase and a RNAse (e.g., RNAse H) which assists in breaking up the DNA/RNA hybrid. After synthesis of the double-stranded DNA, T7 RNA polymerase can be added, and RNA transcribed from the second DNA strand template (Van Gelder et al. U.S. Pat. No. 5,545,522). RNA can be amplified in vitro, in situ or in vivo (See Eberwine U.S. Pat. No. 5,514,545).

[0057] Controls to quantitate the product may be included within the sample to assure that amplification and labeling procedures do not change the relative representation of target polynucleotides in a sample. For this purpose, a sample is spiked with a known amount of a control target polynucleotide and the composition of polynucleotide probes includes reference polynucleotide probes which specifically hybridize with the control target polynucleotides. After hybridization and processing, the hybridization signals obtained should reflect accurately the amounts of control target polynucleotide added to the sample.

[0058] Prior to hybridization, it may be desirable to fragment the nucleic acid target polynucleotides. Fragmentation improves hybridization by minimizing secondary structure and cross-hybridization to other nucleic acid target polynucleotides in the sample or noncomplementary polynucleotide probes. Fragmentation can be performed by mechanical or chemical means.

[0059] The target polynucleotides may be labeled with one or more labeling moieties to allow for detection of hybridized probe/target polynucleotide complexes. The labeling moieties can include compositions that can be detected by spectroscopic, photochemical, biochemical, bioelectronic, immunochemical, electrical, optical or chemical means. The labeling moieties include radioisotopes, such as ³²P, ³³P or ³⁵S, chemiluminescent compounds, labeled binding proteins, heavy metal atoms, spectroscopic markers, such as fluorescent. markers and dyes, magnetic labels, linked enzymes, mass spectrometry tags, spin labels, electron transfer donors and acceptors, and the like.

[0060] Exemplary dyes include quinoline dyes, triarylmethane dyes, phthaleins, azo dyes, cyanine dyes and the like. Preferably, fluorescent markers absorb light above about 300 nm, preferably above 400 nm, and usually emit light at wavelengths at least greater-than 10 nm above the wavelength of the light absorbed. Preferred fluorescent markers include fluorescein, phycoerythrin, rhodamine, lissamine, and C3 and C5 available from Amersham Pharmacia Biotech (Piscataway N.J.).

[0061] Labeling can be carried out during an amplification reaction, such as polymerase chain and in vitro transcription reactions, or by nick translation or 5′ or 3′-end-labeling reactions. When the label is incorporated after or without an amplification step, the label is incorporated by using terminal transferase or by kinasing the 5′ end of the target polynucleotide and then incubating overnight with a labeled oligonucleotide in the presence of T4 RNA ligase.

[0062] Alternatively, the labeling moiety can be incorporated after hybridization once a probe/target complex has formed.

[0063] Nucleic Acid Microarrays: The samples prepared above are hybridized to nucleic acid microarrays of the invention. An array of the invention typically will be a nucleic acid array consisting essentially of at least 4 polynucleotides selected from the polynucleotides listed in any one or more of Gene Tables I through Gene Table VIII, wherein said polynucleotides are immobilized on a solid surface, and wherein the array further contains one or more calibration points and one or more housekeeping genes.

[0064] The housekeeping genes are provided as controls for the chip so as to provide signals corresponding to nucleic acids that are constitutively expressed at a known level. These genes are presumed to produce the minimally essential transcripts necessary for normal cellular physiology, and are expressed at a similar level in almost all cells. These controls are useful in normalizing the data, for example to quantify expression levels. As a control gene, any known reference gene can be used, including, for example, glyceraldehyde-3-phosphate dehydrogenase (GAPDH), β-actin, U-snRNP-associated cyclophilin (USA-CYP), ribosomal protein LPO; 18S ribosomal RNA; Glucoronidase beta; and Ribosomal protein L32. Alternatively, normalization can be achieved by correcting for differences between the total of all signals of the tested gene sets (global normalization strategy). The report may include a prognosis for the outcome of the treatment of the patient. The method may additionally comprise the step of treating the subject, e.g. a human patient, if a good prognosis is indicated.

[0065] The calibration spot is a signal that is contained on the microarray that will be used to ensure that the microarray is approprotately aligned and being read by a detection device. Typically, such a calibration spot comprises a mixture of the plurality of nucleic acids isolated from the sample that are known not to be modulated with IMPDH inhibition.

[0066] In the present invention, 5 or more nucleic acids selected from the distinct sequences of listed in Gene Tables I-VIII may be presented in a DNA microarray for the analysis and expression of these genes in various cell types. Microarray chips are well known to those of skill in the art (e.g., see U.S. Pat. No. 6,308,170; U.S. Pat. No. 6,183,698; U.S. Pat. No. 6,306,643; U.S. Pat. No. 6,297,018; U.S. Pat. No. 6,287,850; U.S. Pat. No. 6,291,183, each incorporated herein by reference. These are merely exemplary patents that disclose nucleic acid microarrays and those of skill in the art will be aware of numerous other methods and compositions for producing microarrays). Given the identification of the above nucleic acids that are specifically responsive to IMPDH inhibition it is possible to use commercially available microarray chips that contain probes that will hybridize to such nucleic acids regardless of any other nucleic acid probes contained on such chips. In this regard a preferred chip is the Affymetrix HG-FOCUS arrays (Affymetrix, CA catalog #900377).

[0067] The present invention provides for a composition comprising a plurality of polynucleotide probes for use in detecting changes in expression of a large number of genes from cells in response to IMPDH inhibition. As used in this section, the term “polynucleotide probe” refers to a nucleic acid that hybridize to any one of the nucleic acids listed in Tables I-VIII or hybridizes to any fragment thereof or any nucleic acid that hybridizes specifically to one such nucleic acid. Particularly preferred exemplary markers of IMPDH inhibition are provided in gene sets I through VIII. Other exemplary markers include ARF4; CCNE2; CGR19;CPR8; EDF1; GTF2F1; LGALS1; PDGFC; PSMC5; PTK9; RABGGTA; SCAP2; SERPINB2; TBPL1. Preferably the fragment is longer than 20 base pairs. Such a composition can be employed for the diagnosis and for monitoring the treatment of any disease in which abnormal IMPDH is found, and preferably diseases in which overexpression or increased activity of IMPDH is implicated. IMPDH-mediated disease refers to any disease state in which the IMPDH enzyme plays a regulatory role in the metabolic pathway of that disease. Examples of IMPDH-mediated diseases include transplant rejection and autoimmune diseases, such as rheumatoid arthritis, multiple sclerosis, juvenile diabetes, asthma, and inflammatory bowel disease, as well as inflammatory diseases, cancer, viral replication diseases and vascular diseases. In particular embodiments, the compositions of the invention may be used to monitor/track the treatment of transplant rejection (e.g., kidney, liver, heart, lung, pancreas (islet cells), bone marrow, cornea, small bowel and skin allografts and heart valve xenografts), rheumatoid arthritis, multiple sclerosis, juvenile diabetes, asthma, inflammatory bowel disease (Crohn's disease, ulcerative colitis), lupus, diabetes, mellitus myasthenia gravis, psoriasis, dermatitis, eczema, seborrhea, pulmonary inflammation, eye uveitis, hepatitis, Grave's disease, Hashimoto's thyroiditis, Behcet's or Sjorgen's syndrome (dry eyes/mouth), pernicious or immunohaemolytic anaemia, idiopathic adrenal insufficiency, polyglandular autoimmune syndrome, and glomerulonephritis, scleroderma, lichen planus, viteligo (depigmentation of the skin), autoimmune thyroiditis, and alveolitis, inflammatory diseases such as osteoarthritis, acute pancreatitis, chronic pancreatitis, asthma and adult respiratory distress syndrome, as well as in the treatment of cancer and tumors, such as solid tumors, lymphomas and leukemia, vascular diseases, such as restenosis, stenosis and atherosclerosis, and DNA and RNA viral replication diseases, such as retroviral diseases, and herpes.

[0068] A particularly useful composition of the present invention is a collection of hybridizable array elements in a microarray for monitoring the expression of a plurality of target polynucleofides. The microarray typically comprises a solid substrate and hybridizable array elements positioned on said substrate. The microarray can be used, for example, in the assessment of the efficacy of IMPDH inhibition on the treatment of a cancer, in immune disorders, in neuropathologies, and the like.

[0069] Tables I through VIII herein list the exemplary sequences disclosed herein as being responsive to IMPDH inhibition. In set I there are listed specific genes that are responsive to VX-944 in resting PBMC cells, i.e., genes from normal non-proliferating lymphocytes that were found to be specifically responsive (i.e., their expression levels were either increased or decreased) to VX-944. Gene set I can be described as a set of genes whose expression changes in changes in blood obtained from patients suffering from cancer, autoimmune, inflammatory diseases upon treatment with IMPDH inhibitors. These genes were: thrombospondin 1; interleukin 18 receptor 1; aldehyde dehydrogenase 1 family, member A1; complement component 1, q subcomponent, beta polypeptide; chitinase 3-like 1 (cartilage glycoprotein-39); BCR downstream signaling 1; XIAP associated factor-1; protein kinase N2; interferon-induced protein with tetratricopeptide repeats 5; CD38 antigen (p45); peroxisomal biogenesis factor 19; defensin, alpha 1, myeloid-related sequence; cleavage and polyadenylation specific factor 1, 160 kDa; hemochromatosis; chromosome 1 open reading frame 29; apolipoprotein B mRNA editing enzyme, catalytic polypeptide-like 3B; interferon, alpha-inducible protein 27; ubiquitin specific protease 18; interferon-induced protein with tetratricopeptide repeats 1; tissue inhibitor of metalloproteinase 2; myxovirus (influenza virus) resistance 1, interferon-inducible protein p78 (mouse); chemokine (C-C motif) ligand 8; interferon regulatory factor 7; 2′-5′-oligoadenylate synthetase 3, 100 kDa; sialoadhesin; interferon-induced protein 44; myxovirus (influenza virus) resistance 2 (mouse); phospholipid scramblase 1; hect domain and RLD 5; interferon, alpha-inducible protein (clone IFI-6-16); interferon, alpha-inducible protein (clone IFI-15K); suppressor of cytokine signaling 1; chromosome 6 open reading frame 11; chemokine (C-C motif) ligand 13; chemokine (C-C motif) ligand 2; interleukin 1 receptor antagonist; chemokine (C-X-C motif) ligand 10; chemokine (C-X-C motif) ligand 9. The sequences of these genes are provided below in Table 1.

[0070] In set II there are listed specific genes that are responsive to VX-944 in resting or non-proliferating and proliferating cells. As such, these genes are those whose gene expression changes in normal human lymphocytes upon treatment with VX-944 or a mitogen or both mitogen and VX-944. This set was determined as follows: the genes altered by VX-944 administration alone in resting lymphocytes were identified by comparing genes altered in VX-944 treated cells as compared to untreated cells. These genes from resting cells were compared with gene expression profile seen in proliferating cells by comparing genes altered in HL60 cells treated with VX-944 compared to untreated HL60 cells. Subsequently, gene expression pattern changes attenuated in proliferating human lymphocytes in the presence of with VX-944 treatment were determined by comparing genes altered in PHA-treated cells compared to untreated cells as compared with genes altered by PHA+VX-944 treated cells. These genes were: chitinase 3-like 1 (cartilage glycoprotein-39) and interleukin 1 receptor antagonist. In gene set III, an assessment was made of the genes that are responsive to VX-944 in resting PBMC cells as well as in HL-60 cells and also genes that were responsive to MPA, another IMPDH inhibitor. These studies again showed that both chitinase 3-like 1 (cartilage glycoprotein-39) and interleukin 1 receptor antagonist are particularly responsive. As such, these two genes will be particularly predictive biomarkers of responsiveness of a given cell to IMPDH inhibition. Gene set II can be monitored in lymphocytes or blood obtained from cancer patients that have been treated with an IMPDH inhibitor such as VX-944.

[0071] Set IV shows the genes that could be monitored in proliferating cells from patients treated with VX-944. This set is typical of the gene expression changes that can be monitored in lymphocytes or blood obtained from cancer, autoimmune, transplant-patients, virally infected or otherwise diseased subjects that have been treated with VX-944. These genes represent a subset of genes that are up- or down-regulated in lymphocytes upon stimulation with a mitogen such as PHA (T1), that are modulated in the presence of VX-944.

[0072] These genes were identified by first inducing PBMC cells to proliferate, e.g., by stimulating the cells with PHA and determining which genes have an altered expression upon proliferation alone. The PBMC's also were analyzed to obtain the differential expression seen in response to both stimulation with PHA and treatment with VX-944. The overlap between the genes that were expressed in both sets of experiments is listed in Set IV as genes that should preferably be monitored in proliferating lymphocytes or cells of patients treated with VX-944. These genes are: RAD54 homolog B (homolog of S. cerevisiae); chemokine (C-C motif) ligand 2; kinesin family member 4A; spleen focus forming virus (SFFV) proviral integration oncogene spi1; chromosome condensation 1; Fc fragment of IgG, high affinity Ia, receptor for (CD64); asialoglycoprotein receptor 2; aurora kinase B; a disintegrin and metalloproteinase domain 28; growth arrest-specific 7; mucolipin 1; activator of S phase kinase; hexokinase 3 (white cell); nudix (nucleoside diphosphate linked moiety X)-type motif 1; Fc fragment of IgE, low affinity II, receptor for (CD23A); hemopoietic cell kinase; kinesin family member 11; SNARE protein Ykt6; 3-hydroxyisobutyryl-Coenzyme A hydrolase; cytochrome P450, family 1, subfamily B, polypeptide 1; chemokine (C motif) ligand 1; cyclin F; primase, polypeptide 2A, 58 kDa; Charcot-Leyden crystal protein; alpha-2-macroglobulin; exonuclease 1; CDC6 cell division cycle 6 homolog (S. cerevisiae); matrix metalloproteinase 1 (interstitial collagenase); protein regulator of cytokinesis 1; leukocyte immunoglobulin-like receptor, subfamily B (with TM and ITIM domains), member 1; KIAA0146 protein; CDC28 protein kinase regulatory subunit 1B; baculoviral IAP repeat-containing 5 (survivin); Rac GTPase activating protein 1; zinc finger homeobox 1b; glycoprotein (transmembrane) nmb; IGF-II mRNA-binding protein 2; solute carrier family 27 (fatty acid transporter), member 2; cyclin-dependent kinase inhibitor 3 (CDK2-associated dual specificity phosphatase); chemokine (C-X3-C motif) receptor 1; sperm associated antigen 5; formyl peptide receptor 1; cadherin 3, type 1, P-cadherin (placental); origin recognition complex, subunit 1-like (homolog of yeast); chromosome condensation 1-like; protein tyrosine phosphatase, non-receptor type 12; myxovirus (influenza virus) resistance 1, interferon-inducible protein p78 (homolog of mouse); solute carrier family 11 (proton-coupled divalent metal ion transporters), member 1; solute carrier family 7 (cationic amino acid transporter, y+ system), member 7; serine hydroxymethyltransferase 2 (mitochondrial); nuclear receptor subfamily 4, group A, member 2; CDC28 protein kinase regulatory subunit 2; aldehyde dehydrogenase 2 family (mitochondrial); matrix metalloproteinase 19; development and differentiation enhancing factor 2; dipeptidylpeptidase 3; aryl hydrocarbon receptor; chemokine (C-C motif) ligand 8; chromosome 1 open reading frame 29; tensin-like SH2 domain containing 1; killer cell lectin-like receptor subfamily F, member 1; tissue inhibitor of metalloproteinase 1 (erythroid potentiating activity, collagenase inhibitor); cat eye syndrome chromosome region, candidate 1; splicing factor 1 [BLAST]; v-fos FBJ murine osteosarcoma viral oncogene homolog; pleckstrin homology-like domain, family A, member 1; geminin, DNA replication inhibitor; hyaluronan-mediated motility receptor (RHAMM); chromosome 1 open reading frame 33; regulator of G-protein signalling 2, 24 kDa; transforming growth factor, beta-induced, 68 kDa; serine/threonine kinase 6; Fc fragment of IgG, low affinity IIa, receptor for (CD32); ribonuclease T2; arachidonate 5-lipoxygenase; cytokine receptor-like factor 2; purinergic receptor P2Y, G-protein coupled, 5; chromobox homolog 5 (HP1 alpha homolog of Drosophila); inositol(myo)-1 (or 4)-monophosphatase 2; 2′-5′-oligoadenylate synthetase 3, 100 kDa; transcription factor EC; chondroitin sulfate proteoglycan 2 (versican); histone 1, H2ac; metallothionein 1X; aquaporin 3; apolipoprotein A-II; chemokine (C motif) ligand 1; RAD51 homolog (RecA homolog of E. coli) (homolog of S. cerevisiae); C-type (calcium dependent, carbohydrate-recognition domain) lectin, superfamily member 5; TYRO protein tyrosine kinase binding protein; polymerase (DNA directed), epsilon 2 (p59 subunit); FBJ murine osteosarcoma viral oncogene homolog B; fucosyltransferase 8 (alpha (1,6) fucosyltransferase); CD14 antigen; GLI pathogenesis-related 1 (glioma); CD209 antigen; thymidine kinase 1, soluble; interleukin 9; dihydropyrimidine dehydrogenase; lectin, galactoside-binding, soluble, 2 (galectin 2); Kruppel-like factor 4 (gut); ribonucleotide reductase M2 polypeptide; proliferating cell nuclear antigen; cyclin B2; killer cell lectin-like receptor subfamily B, member 1; chemokine (C-C motif) receptor 1; syntaxin 11; mannose receptor, C type 1; lung type-I cell membrane-associated glycoprotein; guanidinoacetate N-methyltransferase; alanyl (membrane) aminopeptidase (aminopeptidase N, aminopeptidase M, microsomal aminopeptidase, CD13, p150); zinc finger protein 36, C3H type-like 1; 24-dehydrocholesterol reductase; hematological and neurological expressed 1; M-phase phosphoprotein 1; activation-induced cytidine deaminase; interleukin 1 receptor, type II; transforming growth factor, alpha; collagen, type VI, alpha 3; deoxythymidylate kinase (thymidylate kinase); pleckstrin homology domain containing, family A (phosphoinositide binding specific) member 1; TTK protein kinase; ataxia telangiectasia mutated (includes complementation groups A, C and D); histidine decarboxylase; acyloxyacyl hydrolase (neutrophil); G protein-coupled receptor 77; serine (or cysteine) proteinase inhibitor, clade B (ovalbumin), member 2; solute carrier family 7, (cationic amino acid transporter, y+ system) member 11; splicing factor, arginine/serine-rich 1 (splicing factor 2, alternate splicing factor); glutaminyl-peptide cyclotransferase (glutaminyl cyclase); solute carrier family 16 (monocarboxylic acid transporters), member 6; CCAAT/enhancer binding protein (C/EBP), alpha; SKB1 homolog (S. pombe); v-myb myeloblastosis viral oncogene homolog (avian)-like 2; CDC42 effector protein (Rho GTPase binding) 1; integrin, alpha M (complement component receptor 3, alpha; also known as CD11b (p170), macrophage antigen alpha polypeptide); centromere protein F, 350/400 ka (mitosin); cystatin C (amyloid angiopathy and cerebral hemorrhage); sialic acid binding Ig-like lectin 7; C-type (calcium dependent, carbohydrate-recognition domain) lectin, superfamily member 14 (macrophage-derived); serum/glucocorticoid regulated kinase; uridine monophosphate kinase; Kruppel-like factor 2 (lung); fructose-1,6-bisphosphatase 1; neutrophil cytosolic factor 2 (65 kDa, chronic granulomatous disease, autosomal 2); frizzled homolog 2 (Drosophila); integrin, beta 7; interleukin 12 receptor, beta 2; colony stimulating factor 1 receptor, formerly McDonough feline sarcoma viral (v-fms) oncogene homolog; kinesin family member C3; N-acetylneuraminate pyruvate lyase (dihydrodipicolinate synthase); tensin; complement component 1, q subcomponent, receptor 1; leukocyte immunoglobulin-like receptor, subfamily B (with TM and ITIM domains), member 4; kinesin-like 7; chemokine (C-C motif) ligand 7; myeloid cell nuclear differentiation antigen; BCL2/adenovirus E1B 19 kDa interacting protein 3; pituitary tumor-transforming 1; interferon-induced protein 44; chemokine (C-X-C motif) ligand 2; SLAM family member 8; transferrin receptor 2; integrin, alpha X (antigen CD11C (p150), alpha polypeptide); serine/threonine kinase 6; ficolin (collagen/fibrinogen domain containing) 1; chromodomain helicase DNA binding protein 1-like; Fc fragment of IgG, low affinity IIb, receptor for (CD32); secreted phosphoprotein 1 (osteopontin, bone sialoprotein I, early T-lymphocyte activation 1); CD86 antigen (CD28 antigen ligand 2, B7-2 antigen); achalasia, adrenocortical insufficiency, alacrimia (Allgrove, triple-A); polo-like kinase 1 (hormolog of Drosophila); ectonucleotide pyrophosphatase/phosphodiesterase 2 (autotaxin); nuclear receptor interacting protein 1; thymidylate synthetase; DNA replication complex GINS protein PSF2; CD9 antigen (p24); T-LAK cell-originated protein kinase; RAB31, member RAS oncogene family; centromere protein E, 312 kDa; ZW10 interactor; fibrinogen-like 2; bombesin-like receptor 3; matrix metalloproteinase 12 (macrophage elastase); dual specificity phosphatase 6; chemokine (C-X-C motif) ligand 3; MAD2 mitotic arrest deficient-like 1 (homolog of yeast); leukocyte immunoglobulin-like receptor, subfamily B (with TM and ITIM domains), member 2; CD72 antigen; cellular repressor of E1A-stimulated genes; CHK1 checkpoint homolog (homolog of S. pombe); interferon, gamma-inducible protein 30; ubiquitin-conjugating enzyme E2S; ribokinase; serine/threonine kinase 3 (STE20 homolog of yeast); v-maf musculoaponeurotic fibrosarcoma oncogene homolog B (homolog of avian); exonuclease NEF-sp; vascular endothelial growth factor; stathmin 1/oncoprotein 18; MCM2 minichromosome maintenance deficient 2, mitotin (homolog of S. cerevisiae); ribonuclease, RNase A family, k6; G-protein signalling modulator 2 (AGS3-like, homolog of C. elegans); amylase, alpha 2B; pancreatic; tribbles homolog 1 (homolog of Drosophila); C-type (calcium dependent, carbohydrate-recognition domain) lectin, superfamily member 6; Ig superfamily protein; baculoviral IAP repeat-containing 1; transgelin; kinesin family member 20A; interleukin 3 (colony-stimulating factor, multiple); oxidised low density lipoprotein (lectin-like) receptor 1; Similar to ribosomal protein L13a; 60S ribosomal protein L13a; 23 kD highly basic protein (LOC399810), mRNA [BLAST]; endoplasmic reticulum chaperone SIL1, homolog of yeast; telomerase-associated protein 1; Fc fragment of IgG, receptor, transporter, alpha; nerve growth factor receptor (TNFRSF 16) associated protein 1; BUB1 budding uninhibited by benzimidazoles 1 homolog (homolog of yeast); cyclin A2; BUB1 budding uninhibited by benzimidazoles 1 homolog beta (homolog of yeast); gamma-glutamyltransferase-like activity 1; immunoglobulin superfamily, member 6; hypothetical protein CG003; fer-1-like 3, myoferlin (homolog of C. elegans); cell division cycle 2, G1 to S and G2 to M; erythrocyte membrane protein band 4.1-like 3; cell division cycle 25C; thyroid hormone receptor interactor 13; thrombospondin 1; TPX2, microtubule-associated protein homolog (homolog of Xenopus laevis); CDC20 cell division cycle 20 homolog (homolog of S. cerevisiae); lymphotoxin beta receptor (TNFR superfamily, member 3); membrane-spanning 4-domains, subfamily A, member 4; polo-like kinase 4 (homolog of Drosophila); cyclin-dependent kinase inhibitor 2C (p18, inhibits CDK4); toll-like receptor 8; histamine N-methyltransferase; interleukin 3 receptor, alpha (low affinity); cathepsin L; transforming, acidic coiled-coil containing protein 3; sialyltransferase 4A (beta-galactoside alpha-2,3-sialyltransferase); exosome component 9; BRCA1 associated RING domain 1; reticulon 1; leukocyte immunoglobulin-like receptor, subfamily B (with TM and ITIM domains), member. 1; Transcribed sequences; H2A histone family, member Z; RAD54-like (homolog of S. cerevisiae); chromosome condensation protein G; glutathione transferase zeta 1 (maleylacetoacetate isomerase); kinesin family member 2C; ubiquitin-conjugating enzyme E2C; spinocerebellar ataxia 1 (olivopontocerebellar ataxia 1, autosomal dominant, ataxin 1); v-myb myeloblastosis viral oncogene homolog (homolog of avian); thrombomodulin; centromere protein A, 17 kDa; cytochrome b-245, beta polypeptide (chronic granulomatous disease); endoglin (Osler-Rendu-Weber syndrome 1); formyl peptide receptor-like 2; nucleolar and spindle associated protein 1; tripartite motif-containing 26; BRCA2 and CDKN1A interacting protein; ubiquitin specific protease 18; acid phosphatase 5, tartrate resistant; metallothionein 1H; NIMA (never in mitosis gene a)-related kinase 2; dual specificity phosphatase 1; breast cancer 1, early onset; fatty acid desaturase 2; topoisomerase (DNA) II alpha 170 kDa; neuropilin 1; LIM domain only 2 (rhombotin-like 1); tissue inhibitor of metalloproteinase 2; oncostatin M; S100 calcium binding protein A9 (calgranulin B); chemokine (C-C motif) ligand 24; BTB and CNC homology 1, basic leucine zipper transcription factor 1; leukocyte immunoglobulin-like receptor, subfamily B (with TM and ITIM domains), member 3; ribonuclease, RNase A family, 1 (pancreatic); pro-platelet basic protein (chemokine (C-X-C motif) ligand 7); phospholipase A2, group VII (platelet-activating factor acetylhydrolase, plasma). These genes are listed in Table IV. These genes will be useful in assessing treatment of cancer, autoimmune diseases, inflammatory diseases and the like by VX-944 and are likely to represent attenuation of proliferation by VX-944 in diseases where cell proliferation is implicated. A combination of gene set I and gene set IV reveals markers that can be monitored in hematological malignancies. By hematological malignancies the present application refers to any hematological cancer or hematological disorder that manifests in the proliferation or hyperproliferation of blood cells.

[0073] Set V provides a more select marker set of genes from set IV whose expression also is altered in response to VX-944 in AML or PML cancers or other diseases in which the proliferation of lymphocytes is implicated. Thus, gene expression changes that can be monitored in lymphocytes (PBMCs, blood) obtained from hematological cancers, or other diseases in which proliferation of lymphocytes is implicated in the presence of VX-944 to provide an assessment of the efficacy of VX-944 or IMPDH inhibition in general. This subset of genes includes: kinesin family member 4A; Fc fragment of IgG, high affinity Ia, receptor for (CD64); aurora kinase B; growth arrest-specific 7; solute carrier family 27 (fatty acid transporter), member 2; cyclin-dependent kinase inhibitor 3 (CDK2-associated dual specificity phosphatase); sperm associated antigen 5; formyl peptide receptor 1; chromosome condensation 1-like; tissue inhibitor of metalloproteinase 1 (erythroid potentiating activity, collagenase inhibitor); pleckstrin homology-like domain, family A, member 1; hyaluronan-mediated motility receptor (RHAMM); regulator of G-protein signalling 2, 24 kDa; serine/threonine kinase 6; arachidonate 5-lipoxygenase; inositol(myo)-1(or 4)-monophosphatase 2; metallothionein IX; C-type (calcium dependent, carbohydrate-recognition domain) lectin, superfamily member 5; ribonucleotide reductase M2 polypeptide; cyclin B2; chemokine (C-C motif) receptor 1; mannose receptor, C type 1; collagen, type VI, alpha 3; histidine decarboxylase; G protein-coupled receptor 77; serine (or cysteine) proteinase inhibitor, clade B (ovalbumin), member 2; CCAAT/enhancer binding protein (C/EBP), alpha; integrin, alpha M (complement component receptor 3, alpha; also known as CD11b (p170), macrophage antigen alpha polypeptide); serum/glucocorticoid regulated kinase; neutrophil cytosolic factor 2 (65 kDa, chronic granulomatous disease, autosomal 2); N-acetylneuraminate pyruvate lyase (dihydrodipicolinate synthase); pituitary tumor-transforming 1; integrin, alpha X (antigen CD11C (p150), alpha polypeptide); serine/threonine kinase 6; polo-like kinase 1 (homolog of Drosophila); RAB31, member RAS oncogene family; CD72 antigen; interferon, gamma-inducible protein 30; v-maf musculoaponeurotic fibrosarcoma oncogene homolog B (homolog of avian); tribbles homolog 1 (homolog of Drosophila); oxidised low density lipoprotein (lectin-like) receptor 1; BUB1 budding uninhibited by benzimidazoles 1 homolog beta (homolog of yeast); hypothetical protein CG003; CDC20 cell division cycle 20 homolog (homolog of S. cerevisiae); toll-like receptor 8; kinesin family member 2C; ubiquitin-conjugating enzyme E2C; v-myb myeloblastosis viral oncogene homolog (homolog of avian); centromere protein A, 17 kDa; cytochrome b-245, beta polypeptide (chronic granulomatous disease); nucleolar and spindle associated protein 1; metallothionein 1H; S100 calcium binding protein A9 (calgranulin B); and are listed herein below in Table V.

[0074] The genes in Table IV were further analysed and narrowed to those genes that are responsive to VX-944 and to the unrelated IMPDH inhibitor MPA to provide a subset of IV, that is further narrower than subset V by using genes commonly affected by both VX-944 and MPA in HL60 cells. This subset of genes included the following genes: kinesin family member 4A; Fc fragment of IgG, high affinity Ia, receptor for (CD64); growth arrest-specific 7; solute carrier family 27 (fatty acid transporter), member 2; cyclin-dependent kinase inhibitor 3 (CDK2-associated dual specificity phosphatase); sperm associated antigen 5; formyl peptide receptor 1; chromosome condensation 1-like; tissue inhibitor of metalloproteinase 1 (erythroid potentiating activity, collagenase inhibitor); pleckstrin homology-like domain, family A, member 1; regulator of G-protein signalling 2, 24 kDa; arachidonate 5-lipoxygenase; inositol(myo)-1(or 4)-monophosphatase 2; metallothionein 1X; C-type (calcium dependent, carbohydrate-recognition domain) lectin, superfamily member 5; ribonucleotide reductase M2 polypeptide; chemokine (C-C motif) receptor 1; collagen, type VI, alpha 3; histidine decarboxylase; serine (or cysteine) proteinase inhibitor, clade B (ovalbumin), member 2; integrin, alpha M (complement component receptor 3, alpha; also known as CD11b (p170), macrophage antigen alpha polypeptide); serum/glucocorticoid regulated kinase; neutrophil cytosolic factor 2 (65 kDa, chronic granulomatous disease, autosomal 2); N-acetylneuraminate pyruvate lyase (dihydrodipicolinate synthase); integrin, alpha X (antigen CD11C (p150), alpha polypeptide); RAB31, member RAS oncogene family; CD72 antigen; interferon, gamma-inducible protein 30; v-maf musculoaponeurotic fibrosarcoma oncogene homolog B (homolog of avian); tribbles homolog 1 (homolog of Drosophila); v-myb myeloblastosis viral oncogene homolog (homolog of avian); cytochrome b-245, beta polypeptide (chronic granulomatous disease); nucleolar and spindle associated protein 1; metallothionein 1H; S100 calcium binding protein A9 (calgranulin B); and the sequences of these genes are listed in Table VI.

[0075] VX-944 also has been used as an antiviral agent. Genes that are predictive of the antiviral efficacy of VX-944 are found in Set VII (see Table VII), which were identified as the subset of genes from set I which are also modified in response to interferon. These genes will be useful for monitoring gene expression changes that in lymphocytes (PBMCs, blood) obtained from patients suffering from viral diseases such as HCV, or other diseases in which interferon treatment is useful. These genes were: interferon, alpha-inducible protein (clone IFI-6-16); interferon, alpha-inducible protein (clone IFI-15K); interferon-induced protein with tetratricopeptide repeats 5; interferon-induced protein with tetratricopeptide repeats 1; interferon-induced protein 44; myxovirus (influenza virus) resistance 1, interferon-inducible protein p78 (mouse); chemokine (C-C motif) ligand 2; chemokine (C-X-C motif) ligand 10; chemokine (C-X-C motif) ligand 9 and the sequences of these genes is provided in Table VII.

[0076] In set VIII there are listed the apoptosis genes that are responsive to VX-944. This is a narrower subset of genes from subset IV whose gene expression changes can predict beneficial response to VX-944 and be monitored in lymphocytes (PBMCs, blood) obtained from cancer patients. Out of the 67 genes implicated in cancers, 4 are down-regulated by VX-944 in proliferating lymphocytes. These genes will be predictive of the anti-cancer cancer efficacy of VX-944 in leukemias and/or solid tumors. The sequences of these genes are listed below in Table VIII.

[0077] Alternatively, the above subsets of genes may be segregated according to function and it may be desirable to prepare microarrays that will be useful in providing an indication of the effects of VX-944 or any other IMPDH inhibitor on a specific functional pathway. In this regard, genes involved in apoptosis and whose expression is altered in response to IMPDH inhibition are: nuclear factor of kappa light polypeptide gene enhancer in B-cells 1 (p105); TNF receptor-associated factor 2; TRK-fused gene; lymphotoxin alpha (TNF superfamily, member 1); inhibitor of kappa light polypeptide gene enhancer in B-cells, kinase epsilon; nuclear factor of kappa light polypeptide gene enhancer in B-cells inhibitor, alpha; tumor necrosis factor receptor superfamily, member 5; tumor necrosis factor (ligand) superfamily, member 6; ADP-ribosyltransferase (NAD+; poly (ADP-ribose) polymerase); Fas (TNFRSF6)-associated via death domain; nerve growth factor, beta polypeptide; TNFRSF1A-associated via death domain; BH3 interacting domain death agonist; receptor (TNFRSF)-interacting serine-threonine kinase 1; tumor protein p53 (Li-Fraumeni syndrome); Mdm2, transformed 3T3 cell double minute 2, p53 binding protein (homolog of mouse); caspase 7, apoptosis-related cysteine protease; tumor necrosis factor (TNF superfamily, member 2); myeloid cell leukemia sequence 1 (BCL2-related); caspase 10, apoptosis-related cysteine protease; BCL2-related ovarian killer; tumor necrosis factor receptor superfamily, member 1A; baculoviral IAP repeat-containing 3; B-cell CLL/lymphoma 2; BCL2-associated X protein; TRK-fused gene; tumor necrosis factor receptor superfamily, member 1B; caspase 6, apoptosis-related cysteine protease; tumor necrosis factor (ligand) superfamily, member 10; caspase 9, apoptosis-related cysteine protease; protein tyrosine phosphatase, non-receptor type 13 (APO-1/CD95 (Fas)-associated phosphatase); TNF receptor-associated factor 6; cytochrome c, somatic; mitogen-activated protein kinase kinase 4; v-myc myelocytomatosis viral oncogene homolog (homolog of avian); BCL2-like 2; v-jun sarcoma virus 17 oncogene homolog (homolog of avian); BCL2-antagonist/killer 1; mitogen-activated protein kinase kinase kinase 14;splicing factor, arginine/serine-rich 2, interacting protein; caspase 2, apoptosis-related cysteine protease (neural precursor cell expressed, developmentally down-regulated 2); apoptotic protease activating factor; perforin 1 (pore forming protein); BCL2-antagonist of cell death; BCL2-related protein A1; harakiri, BCL2 interacting protein (contains only BH3 domain); tumor necrosis factor receptor superfamily, member 6; tumor necrosis factor (ligand) superfamily, member 5 (hyper-IgM syndrome); mitogen-activated protein kinase 10; TNF receptor-associated factor 3; TNF receptor-associated factor 1; caspase 8, apoptosis-related cysteine protease; granzyme B (granzyme 2, cytotoxic T-lymphocyte-associated serine esterase 1); baculoviral IAP repeat-containing 2; caspase 4, apoptosis-related cysteine protease; CASP2 and RIPK1 domain containing adaptor with death domain; caspase 1, apoptosis-related cysteine protease (interleukin 1, beta, convertase); DNA fragmentation factor, 45 kDa, alpha polypeptide; DNA fragmentation factor, 40 kDa, beta polypeptide (caspase-activated DNase); baculoviral IAP repeat-containing 4; inhibitor of kappa light polypeptide gene enhancer in B-cells, kinase gamma; caspase 3, apoptosis-related cysteine protease; nuclear receptor subfamily 3, group C, member 1 (glucocorticoid receptor); v-rel reticuloendotheliosis viral oncogene homolog A, nuclear factor of kappa light polypeptide gene enhancer in B-cells 3, p65 (homolog of avian); nerve growth factor receptor (TNFR superfamily, member 16). Thus a microarray may be prepared to determine the efficacy of IMPDH inhibition by monitoring genes involved in apoptosis wherein the microarray comprises at least two or more of the above VX-944-responsive apoptosis-associated genes.

[0078] Genes involved in cellular metabolism that are responsive to VX-944 and IMPDH inhibition include: dehydrogenase/reductase (SDR family) member 4; dehydrogenase/reductase (SDR family) member 10; prion protein (p27-30) (Creutzfeld-Jakob disease, Gerstmann-Strausler-Scheinker syndrome, fatal familial insomnia); phosphomannomutase 1; arylsulfatase B; UDP glycosyltransferase 1 family, polypeptide A10; branched chain keto acid dehydrogenase E1, alpha polypeptide (maple syrup urine disease); 6-phosphofructo-2-kinase/fructose-2,6-biphosphatase 1; chitinase 1 (chitotriosidase); ATPase, Ca++ transporting, plasma membrane 3; tyrosinase-related protein 1; 1-acylglycerol-3-phosphate O-acyltransferase 1 (lysophosphatidic acid acyltransferase, alpha); aldehyde dehydrogenase 1 family, member B1; dehydrogenase/reductase (SDR family) member 6; 3-hydroxyisobutyryl-Coenzyme A hydrolase; isocitrate dehydrogenase 3 (NAD+) alpha; pyruvate dehydrogenase complex, component X; 6-phosphofructo-2-kinase/fructose-2,6-biphosphatase 2; galactokinase 2; pyruvate dehydrogenase (lipoamide) alpha 1; hydroxyprostaglandin dehydrogenase 15-(NAD); flightless I homolog (homolog of Drosophila); glutathione S-transferase M3 (brain); ATPase, H+/K+ exchanging, alpha polypeptide; ATPase, Ca++ transporting, type 2C, member 1; N-sulfoglucosamine sulfohydrolase(sulfamidase); aldehyde dehydrogenase 1 family, member A3; 5,10-methenyltetrahydrofolate synthetase(5-formyltetrahydrofolate cyclo-ligase); succinate-CoA ligase, ADP-forming, beta subunit; carboxypeptidase E; alkaline phosphatase, intestinal; chromodomain protein, Y-like; aldehyde dehydrogenase 5 family, member A1 (succinate-semialdehyde dehydrogenase); aldehyde dehydrogenase 4 family, member A1; branched chain aminotransferase 2, mitochondrial; isocitrate dehydrogenase 3 (NAD+) beta; acyl-CoA synthetase long-chain family member 3; hydroxysteroid (17-beta) dehydrogenase 4; ankyrin 2, neuronal; tryptophan hydroxylase 1 (tryptophan 5-monooxygenase); fibroblast growth factor 16; N-acetyltransferase 2 (arylamine N-acetyltransferase); solute carrier family 27 (fatty acid transporter), member 2; peroxisomal trans-2-enoyl-CoA reductase; phosphoserine aminotransferase 1; alanine-glyoxylate aminotransferase (oxalosis I; hyperoxaluria I; glycolicaciduria; serine-pyruvate aminotransferase); tafazzin (cardiomyopathy, dilated 3A (X-linked); endocardial fibroelastosis 2; Barth syndrome); liver-specific bHLH-Zip transcription factor; UDP glycosyltransferase 8 (UDP-galactose ceramide galactosyltransferase); pyruvate dehydrogenase (lipoamide) alpha 2; arylsulfatase A; alanine-glyoxylate aminotransferase (oxalosis I; hyperoxaluria I; glycolicaciduria; serine-pyruvate aminotransferase); ATPase, Na+/K+ transporting, alpha 1 polypeptide; arylsulfatase F; hydroxysteroid (17-beta) dehydrogenase 12; G protein-coupled receptor 56; phosphoribosyl pyrophosphate amidotransferase; eyes absent homolog 4 (homolog of Drosophila); hydroxyacyl-Coenzyme A dehydrogenase/3-ketoacyl-Coenzyme A thiolase/enoyl-Coenzyme A hydratase (trifunctional protein), alpha subunit; lanosterol synthase (2,3-oxidosqualene-lanosterol cyclase); family with sequence similarity 16, member A, X-linked; alkaline phosphatase, placental (Regan isozyme); acyl-CoA synthetase long-chain family member 1; alkaline phosphatase, liver/bone/kidney; eosinophil chemotactic cytokine; hydroxysteroid (11-beta) dehydrogenase 1; isocitrate dehydrogenase 2 (NADP+), mitochondrial; pyruvate carboxylase; galactosamine (N-acetyl)-6-sulfate sulfatase (Morquio syndrome, mucopolysaccharidosis type IVA); phenylalanine hydroxylase; matrix metalloproteinase 24 (membrane-inserted); nucleolar protein 5A (56 kDa with KKE/D repeat); phosphoglycerate mutase 2 (muscle); AU RNA binding protein/enoyl-Coenzyme A hydratase; retinol dehydrogenase 8 (all-trans); glutathione S-transferase A1; glutamine-fructose-6-phosphate transaminase 1; phosphatidylglycerophosphate synthase; WW domain containing oxidoreductase; serine (or cysteine) proteinase inhibitor, clade A (alpha-1 antiproteinase, antitrypsin), member 4; glutamine-fructose-6-phosphate transaminase 2; phosphoserine phosphatase; aspartoacylase (aminoacylase 2, Canavan disease); oxoglutarate (alpha-ketoglutarate) dehydrogenase (lipoamide); eyes absent homolog 3 (homolog of Drosophila); glyoxylate reductase/hydroxypyruvate reductase; aldehyde dehydrogenase 3 family, member B1; glutathione S-transferase M4; hydroxysteroid (17-beta) dehydrogenase 1; ATP citrate lyase; iduronate 2-sulfatase (Hunter syndrome); WW domain containing oxidoreductase; chitinase 3-like 1 (cartilage glycoprotein-39); propionyl Coenzyme A carboxylase, alpha polypeptide; dopachrome tautomerase (dopachrome delta-isomerase, tyrosine-related protein 2); inorganic pyrophosphatase 2; methylmalonyl Coenzyme A mutase; aldehyde dehydrogenase 1 family, member A2; hydroxysteroid (17-beta) dehydrogenase 3; chitobiase, di-N-acetyl-; ATPase, Ca++ transporting, cardiac muscle, slow twitch 2; UDP glycosyltransferase 2 family, polypeptide B17; selenocysteine lyase; ATPase, Ca++ transporting, ubiquitous; quinoid dihydropteridine reductase; peroxisomal D3,D2-enoyl-CoA isomerase; SA hypertension-associated homolog (homolog of rat); chromosome 1 open reading frame 10; insulin induced gene 1; NEL-like 1 (homolog of chicken); rTS beta protein; sepiapterin reductase (7,8-dihydrobiopterin:NADP+ oxidoreductase); phosphoserine phosphatase; pyrophosphatase (inorganic); branched chain aminotransferase 1, cytosolic; UDP glycosyltransferase 1 family, polypeptide A10; oviductal glycoprotein 1, 120 kDa (mucin 9, oviductin); chromosome 5 open reading frame 4; retinol dehydrogenase 5 (11-cis and 9-cis); chromosome 5 open reading frame 4; ATPase, Na+/K+ transporting, alpha 3 polypeptide; arylsulfatase D; dehydrogenase/reductase (SDR family) member 2; UDP glycosyltransferase 2 family, polypeptide A1; solute carrier family 27 (fatty acid transporter), member 5; glyceronephosphate O-acyltransferase; steroid sulfatase (microsomal), arylsulfatase C, isozyme S; acyl-CoA synthetase long-chain family member 1; glutathione S-transferase pi; aldehyde dehydrogenase 8 family, member A1; 6-phosphofructo-2-kinase/fructose-2,6-biphosphatase 4; ATPase, Ca++ transporting, cardiac muscle, fast twitch 1; aconitase 1, soluble; hydroxysteroid (17-beta) dehydrogenase 7; 1-acylglycerol-3-phosphate O-acyltransferase 3; UDP-glucose pyrophosphorylase 2; chromosome 12 open reading frame 5; glutathione S-transferase M5; phospholipase D1, phophatidylcholine-specific; dehydrogenase/reductase (SDR family) member 8; phospholipase D2; fumarylacetoacetate hydrolase (fumarylacetoacetase); glutathione S-transferase omega 1; 3-hydroxysteroid epimerase; ATPase, Na+/K+ transporting, alpha 2 (+) polypeptide; 2,4-dienoyl CoA reductase 1, mitochondrial; arylsulfatase E (chondrodysplasia punctata 1); 2,4-dienoyl CoA reductase 2, peroxisomal; E-1 enzyme; chitinase 3-like 2; solute carrier family 27 (fatty acid transporter), member 6; phosphoglycerate mutase 1 (brain); hydroxysteroid (17-beta) dehydrogenase 2; 1-acylglycerol-3-phosphate O-acyltransferase 4 (lysophosphatidic acid acyltransferase, delta); aldehyde dehydrogenase 3 family, member A1; iduronate 2-sulfatase (Hunter syndrome); UDP glycosyltransferase 1 family, polypeptide A10; dehydrogenase/reductase (SDR family) member 3; ATPase, Cu++ transporting, alpha polypeptide (Menkes syndrome); matrix metalloproteinase 24 (membrane-inserted); galactokinase 1; ATPase, Ca++ transporting, plasma membrane 1; isocitrate dehydrogenase 1 (NADP+), soluble; 1-acylglycerol-3-phosphate O-acyltransferase 2 (lysophosphatidic acid acyltransferase, beta); succinate-CoA ligase, GDP-forming, alpha subunit; glutathione S-transferase M1; glutathione S-transferase A4; UDP-N-acteylglucosamine pyrophosphorylase 1; glucosamine (N-acetyl)-6-sulfatase (Sanfilippo disease IIID); ATPase, Ca++ transporting, plasma membrane 4; glutathione S-transferase A3; fatty acid 2-hydroxylase; 1-acylglycerol-3-phosphate O-acyltransferase 1 (lysophosphatidic acid acyltransferase, alpha); dehydrogenase/reductase (SDR family) member 9; glutathione S-transferase M4; 3-oxoacid CoA transferase 1; sterol-C4-methyl oxidase-like; carboxylesterase 1 (monocyte/macrophage serine esterase 1); acetyl-Coenzyme A carboxylase alpha; acyl-CoA synthetase long-chain family member 5; methylcrotonoyl-Coenzyme A carboxylase 1 (alpha); UDP glycosyltransferase 1 family, polypeptide A10; hydroxysteroid (11-beta) dehydrogenase 2; COP9 constitutive photomorphogenic homolog subunit 8 (Arabidopsis); ATPase, H+/K+ transporting, nongastric, alpha polypeptide; integrin beta 4 binding protein; ATPase, Cu++ transporting, beta polypeptide (Wilson disease); eyes absent homolog 1 (homolog of Drosophila); 6-phosphofructo-2-kinase/fructose-2,6-biphosphatase 3; asparagine synthetase; formiminotransferase cyclodeaminase; eyes absent homolog 2 (homolog of Drosophila); 2,3-bisphosphoglycerate mutase; amiloride binding protein 1 (amine oxidase (copper-containing)); alpha-methylacyl-CoA racemase; ubiquitin associated and SH3 domain containing, A; acetyl-Coenzyme A carboxylase beta; proprotein convertase subtilisin/kexin type 1; tyrosinase (oculocutaneous albinism IA); ATPase, Ca++ transporting, plasma membrane 2; dicarbonyl/L-xylulose reductase; phosphomannomutase 2; carbonyl reductase 3; arylacetamide deacetylase (esterase); carbonyl reductase 1; NFS1 nitrogen fixation 1 (homolog of S. cerevisiae). As such another contemplated microarray would be one which comprises two or more of the above genes to specifically monitor the efficacy of IMPDH inhibition on metabolic pathways in general.

[0079] Genes involved in the citric acid cycle that are responsive to VX-944 and IMPDH inhibition include: malate dehydrogenase 2, NAD (mitochondrial); isocitrate dehydrogenase 3 (NAD+) alpha; succinate dehydrogenase complex, subunit A, flavoprotein (Fp); isocitrate dehydrogenase 3 (NAD+) beta; dihydrolipoamide dehydrogenase (E3 component of pyruvate dehydrogenase complex, 2-oxo-glutarate complex, branched chain keto acid dehydrogenase complex); aconitase 2, mitochondrial; isocitrate dehydrogenase 3 (NAD+) gamma; succinate dehydrogenase complex, subunit B, iron sulfur (Ip); isocitrate dehydrogenase 2 (NADP+), mitochondrial; pyruvate carboxylase; fumarate hydratase; phosphoenolpyruvate carboxykinase 1 (soluble); oxoglutarate (alpha-ketoglutarate) dehydrogenase (lipoamide); aconitase 1, soluble; isocitrate dehydrogenase 1 (NADP+), soluble; malate dehydrogenase 1, NAD (soluble); succinate-CoA ligase, GDP-forming, alpha subunit. As such another contemplated microarray would be one which comprises two or more of the above genes to specifically monitor the efficacy of IMPDH inhibition on glycolysis and the citric acid cycle in general.

[0080] An array designed to monitor the IMPDH inhibition on genes involved in purine metabolism will advantageously determine the expression levels of two or more genes selected from the group consisting of adenosine monophosphate deaminase 2 (isoform L); hypoxanthine phosphoribosyltransferase 1 (Lesch-Nyhan syndrome); methylenetetrahydrofolate dehydrogenase (NADP+ dependent), methenyltetrahydrofolate cyclohydrolase, formyltetrahydrofolate synthetase; adenosine kinase; adenylosuccinate synthase; IMP (inosine monophosphate) dehydrogenase 1; ATP-binding cassette, sub-family G (WHITE), member 1; phosphoribosyl pyrophosphate amidotransferase; cat eye syndrome chromosome region, candidate 1; thiopurine S-methyltransferase; solute carrier family 28 (sodium-coupled nucleoside transporter), member 2; phosphoribosylaminoimidazole carboxylase, phosphoribosylaminoimidazole succinocarboxamide synthetase; adenosine monophosphate deaminase (isoform E); IMP (inosine monophosphate) dehydrogenase 2; adenosine monophosphate deaminase 1 (isoform M); phosphoribosylglycinamide formyltransferase, phosphoribosylglycinamide synthetase, phosphoribosylaminoimidazole synthetase; adenylosuccinate lyase; nucleoside phosphorylase; 5-aminoimidazole-4-carboxamide ribonucleotide formyltransferase/IMP cyclohydrolase; 8-oxoguanine DNA glycosylase; guanine monphosphate synthetase; adenosine deaminase; adenine phosphoribosyltransferase. Specific microarrays comprising these genes are contemplated as part of the invention.

[0081] Another advantage array may be one which can be used to determine the expression levels of lysosomal enzymes that are altered in response to IMPDH inhibition. Such specific arrays may comprise two or more of the following genes: arylsulfatase B; prolylcarboxypeptidase (angiotensinase C); scavenger receptor class B, member 2; acid phosphatase 2, lysosomal; cystinosis, nephropathic; coronin, actin binding protein, 1A; lysosomal-associated membrane protein 2; CD63 antigen (melanoma 1 antigen); lysosomal-associated membrane protein 3.

[0082] An array for monitoring chemokines that are responsive to IMPDH inhibition will advantageously comprise a plurality of genes selected from the group consisting of: chemokine (C-X-C motif) ligand 14;chemokine (C-X-C motif) ligand 11; chemokine (C motif) ligand 1; chemokine-like factor; chemokine (C-X-C motif) ligand 6 (granulocyte chemotactic protein 2); platelet factor 4 (chemokine (C-X-C motif) ligand 4); chemokine (C-C motif) receptor-like 1; chemokine (C-X3-C motif) ligand 1; Burkitt lymphoma receptor 1, GTP binding protein (chemokine (C-X-C motif) receptor 5); chemokine (C-X3-C motif) receptor 1; chemokine-like receptor 1; chemokine (C-X-C motif) receptor 6; chemokine (C-C motif) ligand 8; chemokine (C-C motif) ligand 25; chemokine (C motif) ligand 1; tumor necrosis factor receptor superfamily, member 1B; chemokine (C-C motif) ligand 18 (pulmonary and activation-regulated); chemokine (C-X-C motif) ligand 13 (B-cell chemoattractant); G protein-coupled receptor 17; chemokine binding protein 2; chemokine (C-C motif) ligand 3; chemokine (C-X-C motif) ligand 5; chemokine (C-C motif) ligand 1; chemokine (C-C motif) ligand 17; chemokine (C-C motif) receptor-like 2; chemokine(C-X-C motif) ligand 2; chemokine (C-C motif) ligand 20; cardiotrophin-like cytokine; chemokine (C-C motif) ligand 16; G protein-coupled receptor 2; chemokine (C-X-C motif) ligand 3; colony stimulating factor 2 receptor, beta, low-affinity (granulocyte-macrophage); chemokine (C-C motif) ligand 27; chemokine (C-C motif) ligand 22; chemokine (C-C motif) ligand 15 [BLAST]; chemokine (C-C motif) ligand 21; chemokine (C-X-C motif) ligand 9; chemokine (C-C motif) ligand 19; chemokine (C-C motif) ligand 13; platelet factor 4 variant 1; chemokine (C-C motif) ligand 24; and interleukin 18 (interferon-gamma-inducing factor).

[0083] A cell-adhesion microarray that contains genes responsive to IMPDH inhibition also is part of the invention and will comprise a plurality of genes selected from the group consisting of: chemokine (C-C motif) ligand 2; protocadherin gamma subfamily C, 3; brain-specific angiogenesis inhibitor 1; cell adhesion molecule with homology to L1CAM (close homolog of L1); catenin (cadherin-associated protein), alpha 1, 102 kDa; sushi-repeat-containing protein, X-linked; EGF-like repeats and discoidin I-like domains 3; cadherin 1, type 1, E-cadherin (epithelial); Clone IMAGE:5301388, mRNA; Rho GTPase activating protein 5; retinal outer segment membrane protein 1; bystin-like; myelin associated glycoprotein; protein disulfide isomerase, pancreatic; limbic system-associated membrane protein; cadherin 17, LI cadherin (liver-intestine); poliovirus receptor-related 1 (herpesvirus entry mediator C; nectin); cadherin 9, type 2 (T1-cadherin); CD226 antigen; parvin, alpha; trophinin associated protein (tastin); protocadherin gamma subfamily C, 3; selectin P (granule membrane protein 140 kDa, antigen CD62); ephrin-B1; plakophilin 2; sema domain, immunoglobulin domain (Ig), transmembrane domain (TM) and short cytoplasmic domain, (semaphorin) 4D; desmocollin 2; selectin E (endothelial adhesion molecule 1); cadherin, EGF LAG seven-pass G-type receptor 2 (flamingo homolog of Drosophila); calsyntenin 2; myosin binding protein C, cardiac; ARS component B; sema domain, seven thrombospondin repeats (type 1 and type 1-like), transmembrane domain (TM) and short cytoplasmic domain, (semaphorin) 5A; neural precursor cell expressed, developmentally down-regulated 9; intercellular adhesion molecule 2; alpha-1-microglobulinlbikunin precursor; sialic acid binding Ig-like lectin 5; plakophilin 3; laminin, gamma 1 (formerly LAMB2); flotillin 2; integrin, alpha E (antigen CD103, human mucosal lymphocyte antigen 1; alpha polypeptide); myosin binding protein C, slow type; retinoschisis (X-linked, juvenile) 1; desmocollin 1; CD44 antigen (homing function and Indian blood group system); thrombospondin 2; fasciculation and elongation protein zeta 1 (zygin I); BH-protocadherin (brain-heart); protocadherin beta 12; leupaxin; insulin-like growth factor binding protein, acid labile subunit; pinin, desmosome associated protein; parvin, beta; chemokine (C-X3-C motif) ligand 1; scavenger receptor class B, member 2; amyloid beta (A4) precursor-like protein 1; Rho GDP dissociation inhibitor (GDI) alpha; parvin, beta; collagen, type V, alpha 3; sialophorin (gpL115, leukosialin, CD43); laminin, gamma 3; hyaluronan and proteoglycan link protein 2; collagen, type XIX, alpha 1; cadherin 15, M-cadherin (myotubule); chemokine (C-X3-C motif) receptor 1; laminin, alpha 2 (merosin, congenital muscular dystrophy); cadherin 3, type 1, P-cadherin (placental); bone gamma-carboxyglutamate (gla) protein (osteocalcin); lectin, galactoside-binding, soluble, 7 (galectin 7); protocadherin 11 X-linked; protocadherin alpha 2; chondroitin sulfate proteoglycan 4 (melanoma-associated); tumor necrosis factor (TNF superfamily, member 2); myosin binding protein H; TYRO3 protein tyrosine kinase; plakophilin 1 (ectodermal dysplasia/skin fragility syndrome); neuropilin 2; vascular cell adhesion molecule 1; acetylcholinesterase (YT blood group); erbb2 interacting protein; a disintegrin and metalloproteinase domain 2 (fertilin beta); polycystic kidney disease 1 (autosomal dominant); thrombospondin 4; multimerin 1; laminin, beta 3; cadherin 11, type 2, OB-cadherin (osteoblast); contactin 1; Lutheran blood group (Auberger b antigen included); protein tyrosine phosphatase, receptor type, U; catenin (cadherin-associated protein), alpha 2; desmoglein 3 (pemphigus vulgaris antigen); collagen, type XVI, alpha 1; chemokine (C-X-C motif) receptor 3; desmoglein 2; tenascin R (restrictin, janusin); growth arrest-specific 6; comeodesmosin; transforming growth factor, beta-induced, 68 kDa; collagen, type VIII, alpha 1; FXYD domain containing ion transport regulator 5; transforming growth factor beta 1 induced transcript 1; spondin 2, extracellular matrix protein; dystonin; intercellular adhesion molecule 3; DiGeorge syndrome critical region gene 2; collagen, type VII, alpha 1 (epidermolysis bullosa, dystrophic, dominant and recessive); CD99 antigen; L1 cell adhesion molecule (hydrocephalus, stenosis of aqueduct of Sylvius 1, MASA (mental retardation, aphasia, shuffling gait and adducted thumbs) syndrome, spastic paraplegia 1); laminin, beta 1; calcium and integrin binding 1 (calmyrin); collagen, type V, alpha 1; WNT1 inducible signaling pathway protein 1; cadherin 7, type 2; tissue specific transplantation antigen P35B; collagen, type XVIII, alpha 1; vinexin beta (SH3-containing adaptor molecule-1); desmocollin 3; brevican; protocadherin beta 6; collagen, type XV, alpha 1; cadherin, EGF LAG seven-pass G-type receptor 1 (flamingo homolog of Drosophila); amine oxidase, copper containing 3 (vascular adhesion protein 1); glycoprotein Ib (platelet), alpha polypeptide; CD209 antigen; integrin, alpha 7; trophoblast glycoprotein; pancreatitis-associated protein; crumbs homolog 1 (homolog of Drosophila); oligodendrocyte myelin glycoprotein; sialic acid binding Ig-like lectin 7; integrin, alpha 2b (platelet glycoprotein IIb of IIb/IIIa complex, antigen CD41B); discs, large homolog 5 (homolog of Drosophila); slit homolog 2 (homolog of Drosophila); NEL-like 2 (homolog of chicken); protocadherin beta 11; protocadherin alpha 2; nephronophthisis 1 (juvenile); neuroligin 3; intercellular adhesion molecule 5, telencephalin; protocadherin beta 5; collagen, type VI, alpha 3; phosphoglucomutase 5; contactin 2 (axonal); deleted in liver cancer 1; cadherin 5, type 2, VE-cadherin (vascular epithelium); slit homolog 3 (homolog of Drosophila); AE binding protein 1; ATPase, Ca++ transporting, cardiac muscle, slow twitch 2; chemokine (C-C motif) receptor 3; spastic paraplegia 7, paraplegin (pure and complicated autosomal recessive); myeloid/lymphoid or mixed-lineage leukemia (trithorax homolog of Drosophila); translocated to, 4; CD209 antigen-like; heparan sulfate proteoglycan 2 (perlecan); activated leukocyte cell adhesion molecule; cadherin 12, type 2 (N-cadherin 2); PTK2B protein tyrosine kinase 2 beta; nidogen (enactin); chemokine (C-X-C motif) ligand 12 (stromal cell-derived factor 1); glycoprotein V (platelet); discoidin domain receptor family, member 1; epithelial V-like antigen 1; chromosome 1 open reading frame 10; lectin, galactoside-binding, soluble, 3 binding protein; NEL-like 1 (homolog of chicken); neuronal cell adhesion molecule; amyloid beta (A4) precursor protein-binding, family A, member 1 (X11); melanoma cell adhesion molecule; sialic acid binding Ig-like lectin 7; protocadherin alpha 2; CD84 antigen (leukocyte antigen); colony stimulating factor 3 receptor (granulocyte); protocadherin 8; sialoadhesin; protein tyrosine phosphatase, receptor type, S; neural cell adhesion molecule 2; ectonucleoside triphosphate diphosphohydrolase 1; vitronectin (serum spreading factor, somatomedin B, complement S-protein); mesothelin; adhesion regulating molecule 1; coagulation factor V (proaccelerin, labile factor); intercellular adhesion molecule 1 (CD54), human rhinovirus receptor; protocadherin alpha 2; junction plakoglobin; chemokine (C-C motif) receptor 8; CD22 antigen; complement component 1, q subcomponent, receptor 1; neural cell adhesion molecule 1; protocadherin beta 1; aggrecan 1 (chondroitin sulfate proteoglycan 1, large aggregating proteoglycan, antigen identified by monoclonal antibody A0122); protocadherin alpha 2; integrin-binding sialoprotein (bone sialoprotein, bone sialoprotein II); CD33 antigen (gp67); stromal interaction molecule 1; armadillo repeat gene deletes in velocardiofacial syndrome; laminin, beta 2 (laminin S); signal-induced proliferation-associated gene 1; tetraspan 2; von Willebrand factor; elastin microfibril interfacer 1; reelin; endothelial differentiation, sphingolipid G-protein-coupled receptor, 1; protein tyrosine phosphatase, receptor type, F; protocadherin 9; cadherin 16, KSP-cadherin; alpha-2-glycoprotein 1, zinc; CD36 antigen (collagen type I receptor, thrombospondin receptor); symplekin; contactin 6; sialic acid binding Ig-like lectin 8; chondroitin sulfate proteoglycan 3 (neurocan); cadherin, EGF LAG seven-pass G-type receptor 2 (flamingo homolog of Drosophila); CD9 antigen (p24); nephrosis 1, congenital, Finnish type (nephrin); selectin L (lymphocyte adhesion molecule 1); natural killer cell transcript 4; FAT tumor suppressor homolog 1 (homolog of Drosophila); cadherin 8, type 2; coagulation factor VIII, procoagulant component (hemophilia A); integrin, beta 2 (antigen CD18 (p95), lymphocyte function-associated antigen 1; macrophage antigen 1 (mac-1) beta subunit); Kallmann syndrome 1 sequence; proline-serine-threonine phosphatase interacting protein 1; mucosal vascular addressin cell adhesion molecule 1; periostin, osteoblast specific factor; sarcospan (Kras oncogene-associated gene); hyaluronan binding protein 2; Rho family GTPase 1; catenin (cadherin-associated protein), delta 1; glycoprotein Ib (platelet), beta polypeptide; amyloid beta (A4) precursor protein (protease nexin-II, Alzheimer disease); protocadherin beta 8; junctional adhesion molecule 2; a disintegrin and metalloproteinase domain 22; CD72 antigen; tenascin C (hexabrachion); collectin sub-family member 10 (C-type lectin); vinculin; catenin (cadherin-associated protein), beta 1, 88 kDa; trophinin; catenin (cadherin-associated protein), delta 2 (neural plakophilin-related arm-repeat protein); vascular endothelial growth factor; protein tyrosine phosphatase, non-receptor type substrate 1; CD44 antigen (homing function and Indian blood group system); CD2 antigen (p50), sheep red blood cell receptor; cysteine-rich secretory protein 3; C-type (calcium dependent, carbohydrate-recognition domain) lectin, superfamily member 6; cadherin 6, type 2, K-cadherin (fetal kidney); Usher syndrome 2A (autosomal recessive, mild); myosin binding protein C, fast type; cell adhesion molecule-related/down-regulated by oncogenes; fibronectin leucine rich transmembrane protein 3; scavenger receptor class B, member 1; carbohydrate (N-acetylglucosamine 6-O) sulfotransferase 4; hyaluronan synthase 1; retinal degeneration, slow; roundabout, axon guidance receptor, homolog 1 (homolog of Drosophila); WNT1 inducible signaling pathway protein 2; chromosome 1 open reading frame 38; egf-like module containing, mucin-like, hormone receptor-like 1; immunoglobulin superfamily, member 1; tumor necrosis factor (ligand) superfamily, member 5 (hyper-IgM syndrome); desmoglein 1; intercellular adhesion molecule 4, Landsteiner-Wiener blood group; selectin P ligand; spastic paraplegia 7, paraplegin (pure and complicated autosomal recessive); claudin 1; leucine rich repeat neuronal 5; likely ortholog of mouse gene rich cluster, C10 gene; protocadherin beta 3; contactin associated protein 1; glucosamine (UDP-N-acetyl)-2-epimerase/N-acetylmannosamine kinase; CD6 antigen; milk fat globule-EGF factor 8 protein; KIT ligand; calcium/calmodulin-dependent serine protein kinase (MAGUK family); zyxin; discoidin domain receptor family, member 2; adenomatosis polyposis coli; tetraspan 1; glycoprotein IX (platelet); thrombospondin 1; sialic acid binding Ig-like lectin 6; embryonal Fyn-associated substrate; protocadherin gamma subfamily C, 3; claudin 10; tumor necrosis factor, alpha-induced protein 6; lectin, galactoside-binding, soluble, 4 (galectin 4); FAT tumor suppressor homolog 2 (homolog of Drosophila); formyl peptide receptor-like 1; osteomodulin; carbohydrate sulfotransferase 10; Rho GDP dissociation inhibitor (GDI) beta; collagen, type VIII, alpha 1; neogenin homolog 1 (homolog of chicken); a disintegrin and metalloproteinase domain 10; protocadherin gamma subfamily C, 3; CD97 antigen; kininogen 1; protocadherin gamma subfamily C, 3; lymphocyte antigen 6 complex, locus D; cadherin 4, type 1, R-cadherin (retinal); lysyl oxidase-like 2; GDP-mannose 4,6-dehydratase; collagen, type XI, alpha 1; chemokine (C-C motif) ligand 11; RAB13, member RAS oncogene family; integrin beta 3 binding-protein (beta3-endonexin); protocadherin gamma subfamily C, 3; cartilage oligomeric matrix protein; DiGeorge syndrome critical region gene 6; spleen tyrosine kinase; connective tissue growth factor; cadherin, EGF LAG seven-pass G-type receptor 3 (flamingo homolog of Drosophila); scavenger receptor class F, member 1; hyaluronan and proteoglycan link protein 1; CD151 antigen; cadherin 2, type 1, N-cadherin (neuronal); neurotrimin; a disintegrin and metalloproteinase domain 12 (meltrin alpha); plexin C1; endoglin (Osler-Rendu-Weber syndrome 1); ret proto-oncogene (multiple endocrine neoplasia and medullary thyroid carcinoma 1, Hirschsprung disease); cadherin 19, type 2; immunoglobulin superfamily containing leucine-rich repeat; protocadherin gamma subfamily C, 3; protocadherin 12; dermatopontin; CD58 antigen, (lymphocyte function-associated antigen 3); ADAM-like, decysin 1; CD164 antigen, sialomucin; neurexin 3; tumor necrosis factor receptor superfamily, member 12A; PTK7 protein tyrosine kinase 7; cysteine-rich, angiogenic inducer, 61; CD34 antigen; protocadherin alpha 2; neuropilin 1; laminin, alpha 4; serum amyloid A2; nidogen 2 (osteonidogen); plakophilin 4; tuberous sclerosis 1; cadherin 18, type 2; transmembrane protein 8 (five membrane-spanning domains); macrophage erythroblast attacher; opioid binding protein/cell adhesion molecule-like; interleukin 18 (interferon-gamma-inducing factor); and ninjurin 2.

[0084] Glycosylation-associated genes that were found to be responsive to IMPDH inhibition and that could be used to prepare a microarray include: core 2 beta-1,6-N-acetylglucosaminyltransferase 3; sialyltransferase 8E (alpha-2,8-polysialyltransferase); mannosyl(alpha-1,6-)-glycoprotein beta-1,2-N-acetylglucosaminyltransferase; low density lipoprotein-related protein 2; glucosaminyl (N-acetyl) transferase 3, mucin type; mannosyl (alpha-1,3-)-glycoprotein beta-1,2-N-acetylglucosaminyltransferase; UDP-N-acetyl-alpha-D-galactosamine:polypeptide N-acetylgalactosaminyltransferase 1 (GalNAc-T1); stress-associated endoplasmic reticulum protein 1; transmembrane 4 superfamily member 5; lipase, hepatic; asparagine-linked glycosylation 3 homolog (yeast, alpha-1,3-mannosyltransferase); mannosyl(alpha-1,6-)-glycoprotein beta-1,6-N-acetyl-glucosaminyltransferase; UDP-GlcNAc:betaGal beta-1,3-N-acetylglucosaminyltransferase 3; mannosidase, alpha, class 1A, member 1; UDP-glucose ceramide glucosyltransferase-like 2; mannosyl (beta-1,4-)-glycoprotein beta-1,4-N-acetylglucosaminyltransferase; sialyltransferase 9 (CMP-NeuAc:lactosylceramide alpha-2,3-sialyltransferase; GM3 synthase); fucosyltransferase 1 (galactoside 2-alpha-L-fucosyltransferase); fucosyltransferase 9 (alpha (1,3) fucosyltransferase); sialyltransferase 8D (alpha-2,8-polysialyltransferase); fucosyltransferase 4 (alpha (1,3) fucosyltransferase, myeloid-specific); asparagine-linked glycosylation 6 homolog (homolog of yeast, alpha-1,3-glucosyltransferase); ribophorin I; Kell blood group; low density lipoprotein receptor (familial hypercholesterolemia); UDP-Gal:betaGlcNAc beta 1,3-galactosyltransferase, polypeptide 3; beta-1,3-glucuronyltransferase 1 (glucuronosyltransferase P); transmembrane 4 superfamily member 4; UDP-Gal:betaGlcNAc beta 1,3-galactosyltransferase, polypeptide 4; tissue specific transplantation antigen P35B; UDP-N-acetyl-alpha-D-galactosamine:polypeptide N-acetylgalactosaminyltransferase 2 (GaINAc-T2); phosphatidylinositol glycan, class B; protein-O-mannosyltransferase 1; sialyltransferase 8C (alpha2,3Galbeta1,4GlcNAcalpha 2,8-sialyltransferase); sialyltransferase 1 (beta-galactoside alpha-2,6-sialyltransferase); ribophorin II; interleukin 17 (cytotoxic T-lymphocyte-associated serine esterase 8); fucosyltransferase 7 (alpha (1,3) fucosyltransferase); UDP-Gal:betaGlcNAc beta 1,3-galactosyltransferase, polypeptide 2; dolichyl-phosphate mannosyltransferase polypeptide 1, catalytic subunit; component of oligomeric golgi complex 2; fucosyltransferase 5 (alpha (1,3) fucosyltransferase); stromal cell-derived factor 2; integral membrane protein 1; sialyltransferase 8A (alpha-N-acetylneuraminate: alpha-2,8-sialyltransferase, GD3 synthase); galactose-3-O-sulfotransferase 1; glucosaminyl (N-acetyl) transferase 2, I-branching enzyme; protein-O-mannosyltransferase 2; O-linked N-acetylglucosamine (GIcNAc) transferase (UDP-N-acetylglucosamine:polypeptide-N-acetylglucosaminyl transferase); mannosidase, alpha, class 1C, member 1; UDP-GlcNAc:betaGal beta-1,3-N-acetylglucosaminyltransferase 4; transmembrane 4 superfamily member 3; asparagine-linked glycosylation 5 homolog (homolog of yeast, dolichyl-phosphate beta-glucosyltransferase); UDP-glucose ceramide glucosyltransferase-like 1; transmembrane 4 superfamily member 2; mannosidase, alpha, class 1B, member 1; sialyltransferase 4C (beta-galactoside alpha-2,3-sialyltransferase); alpha-1,4-N-acetylglucosaminyltransferase; sialyltransferase 7 ((alpha-N-acetylneuraminyl-2,3-beta-galactosyl-1,3)-N-acetyl galactosaminide alpha-2,6-sialyltransferase) B; CD37 antigen; fucosyltransferase 6 (alpha (1,3) fucosyltransferase); sialyltransferase 10 (alpha-2,3-sialyltransferase VI); UDP-GlcNAc:betaGal beta-1,3-N-acetylglucosaminyltransferase 1; CDNA clone IMAGE:5093665, partial cds; sialyltransferase 4A (beta-galactoside alpha-2,3-sialyltransferase); sialyltransferase 7 ((alpha-N-acetylneuraminyl-2,3-beta-galactosyl-1,3)-N-acetyl galactosaminide alpha-2,6-sialyltransferase) E; glycophorin C (Gerbich blood group); glucosaminyl (N-acetyl) transferase 1, core 2 (beta-1,6-N-acetylglucosaminyltransferase); UDP-Gal:betaGlcNAc beta 1,3-galactosyltransferase, polypeptide 1; mannosidase, alpha, class 2B, member 1; fucosyltransferase 3 (galactoside 3(4)-L-fucosyltransferase, Lewis blood group included); sialyltransferase 7D ((alpha-N-acetylneuraminyl-2,3-beta-galactosyl-1,3)-N-acetyl galactosaminide alpha-2,6-sialyltransferase); lipase A, lysosomal acid, cholesterol esterase (Wolman disease); UDP-Gal:betaGlcNAc beta 1,3-galactosyltransferase, polypeptide 5; sialyltransferase 8B (alpha-2,8-sialyltransferase); dolichyl-diphosphooligosaccharide-protein glycosyltransferase; dolichyl-phosphate mannosyltransferase polypeptide 2, regulatory subunit; phosphomannomutase 2; and glucosidase I.

[0085] Microarrays that comprise chemotaxis-associated genes that are responsive to IMPDH inhibition would advantageously include a plurality of genes selected from the group consisting of: chemokine (C-C motif) receptor 7; chemokine (C-C motif) ligand 2; chemokine (C-X-C motif) ligand 14;chemokine (C-X-C motif) ligand 11; interleukin 8; chemokine (C-C motif) receptor 9; chemokine (C motif) ligand 1; chemokine-like factor; interleukin 4; chemokine (C-X-C motif) ligand 6 (granulocyte chemotactic protein 2); platelet factor 4 (chemokine (C-X-C motif) ligand 4); leukocyte cell-derived chemotaxin 2; chemokine (C-C motif) receptor-like 1; fibroblast growth factor 2 (basic); chemokine (C-X3-C motif) ligand 1; sialophorin (gpL115, leukosialin, CD43); plasminogen activator, urokinase receptor; chemokine (C-X3-C motif) receptor 1; chemokine-like receptor 1; chemokine (C-C motif) ligand 8; complement component 5; interleukin 8 receptor, beta; chemokine (C-C motif) ligand 25; azurocidin 1 (cationic antimicrobial protein 37); complement component 3a receptor 1; chemokine (C motif) receptor 1; chemokine (C-X-C motif) receptor 3; G protein-coupled receptor 77; phosphoinositide-3-kinase, catalytic, beta polypeptide; ribonuclease, RNase A family, 2 (liver, eosinophil-derived neurotoxin); chemokine (C motif) ligand 1; chemokine (C-C motif) receptor 5; chemokine (C-C motif) ligand 18 (pulmonary and activation-regulated); slit homolog 2 (homolog of Drosophila); chemokine (C-X-C motif) ligand 13 (B-cell chemoattractant); v-ral simian leukemia viral oncogene homolog A (ras related); chemokine (C-C motif) receptor 3; G protein-coupled receptor 77; chemokine binding protein 2; chemokine (C-X-C motif) ligand 12 (stromal cell-derived factor 1); mitogen-activated protein kinase 14;chemokine (C-X-C motif) ligand 2; chemokine (C-X-C motif) ligand 5; chemokine (C-C motif) ligand 1; chemokine (C-C motif) ligand 17; chemokine (C-X-C motif) ligand 10; serine (or cysteine) proteinase inhibitor, clade D (heparin cofactor), member 1; chemokine (C-C motif) receptor 8; endothelial cell growth factor 1 (platelet-derived); chemokine (C-X-C motif) ligand 2; FOS-like antigen 1; secretogranin III; chemokine (C-C motif) ligand 23; interleukin 10; secreted phosphoprotein 1 (osteopontin, bone sialoprotein I, early T-lymphocyte activation 1); ectonucleotide pyrophosphatase/phosphodiesterase 2 (autotaxin); platelet-activating factor receptor; chemokine (C-C motif) ligand 20; chemokine (C-C motif) receptor 6; phospholipase D1, phophatidylcholine-specific; chemokine (C-C motif) ligand 16; Kallmann syndrome 1 sequence; chemokine (C-C motif) ligand 15; chemokine (C-X-C motif) ligand 3; roundabout, axon guidance receptor, homolog 3 (homolog of Drosophila); mitogen-activated protein kinase 1; ralA binding protein 1; plasminogen activator, urokinase; defensin, beta 4; roundabout, axon guidance receptor, homolog 1 (homolog of Drosophila); interleukin 16 (lymphocyte chemoattractant factor); chemokine (C-C motif) ligand 27; chemokine (C-C motif) ligand 22; formyl peptide receptor-like 1; small inducible cytokine subfamily E, member 1 (endothelial monocyte-activating); v-Ha-ras Harvey rat sarcoma viral oncogene homolog; Transcribed sequences; chemokine (C-C motif) ligand 11; spleen tyrosine kinase; chemokine (C-C motif) receptor 4; chemokine (C-C motif) ligand 21; chemokine (C-X-C motif) ligand 9; formyl peptide receptor-like 2; chemokine (C-C motif) ligand 19; mitogen-activated protein kinase kinase 1; chemokine (C-C motif) ligand 13; cysteine-rich, angiogenic inducer, 61; serum amyloid A2; chemokine (C-C motif) ligand 24; and pro-platelet basic protein (chemokine (C-X-C motif) ligand 7).

[0086] Microarrays that are specific for cell-cell signaling pathway response to IMPDH would include a plurality of genes selected from the group consisting of G protein-coupled receptor 50; glutamyl aminopeptidase (aminopeptidase A); chemokine (C-X-C motif) ligand 14;chemokine (C-X-C motif) ligand 11; vasoactive intestinal peptide; interferon, alpha 8; ephrin-A5; gap junction protein, beta 1, 32 kDa (connexin 32, Charcot-Marie-Tooth neuropathy, X-linked); interferon, alpha 10; a disintegrin and metalloproteinase domain 17 (tumor necrosis factor, alpha, converting enzyme); S100 calcium binding protein A6 (calcyclin); poliovirus receptor-related 1 (herpesvirus entry mediator C; nectin); netrin 1; interleukin 8; carcinoembryonic antigen-related cell adhesion molecule 6 (non-specific cross reacting antigen); neuregulin 2; ephrin-B1; pan-hematopoietic expression; plakophilin 2; adrenergic, alpha-1A-, receptor; lymphotoxin alpha (TNF superfamily, member 1); interferon, gamma; fatty acid binding protein 1, liver; somatostatin receptor 3; wingless-type MMTV integration site family, member 4; chemokine (C motif) ligand 1; granulin; sema domain, seven thrombospondin repeats (type 1 and type 1-like), transmembrane domain (TM) and short cytoplasmic domain, (semaphorin) 5A; leptin (obesity homolog of mouse); TGFB inducible early growth response; intercellular adhesion molecule 2; thioredoxin; tachykinin, precursor 1 (substance K, substance P, neurokinin 1, neurokinin 2, neuromedin L, neurokinin alpha, neuropeptide K, neuropeptide gamma); sonic hedgehog homolog (homolog of, Drosophila); chemokine (C-X-C motif) ligand 6 (granulocyte chemotactic protein 2); tumor necrosis factor (ligand) superfamily, member 6; ephrin-A4; fibroblast growth factor 17; CD44 antigen (homing function and Indian blood group system); nerve growth factor, beta polypeptide; fibroblast growth factor 4 (heparin secretory transforming protein 1, Kaposi sarcoma oncogene); adrenergic, alpha-2C-, receptor; fibroblast growth factor 2 (basic); CD80 antigen (CD28 antigen ligand 1, B7-1 antigen); fibroblast growth factor 8 (androgen-induced); fibroblast growth factor 3 (murine mammary tumor virus integration site (v-int-2) oncogene homolog); myelin protein zero-like 1; fibroblast growth factor 16; gap junction protein, alpha 3, 46 kDa (connexin 46); adenosine A1 receptor; bone morphogenetic protein 10; tumor suppressor candidate 2; fibroblast growth factor 1 (acidic); thyrotropin-releasing hormone degrading ectoenzyme; tumor necrosis factor (TNF superfamily, member 2); bone morphogenetic protein 3 (osteogenic); gap junction protein, alpha 1, 43 kDa (connexin 43); colony stimulating factor 3 (granulocyte); vasoactive intestinal peptide receptor 2; proprotein convertase subtilisin/kexin type 5; vascular cell adhesion molecule 1; transforming growth factor, beta 3; tumor necrosis factor (ligand) superfamily, member 8; chemokine (C-C motif) ligand 8; ephrin-A1; somatostatin receptor 2; chorionic somatomammotropin hormone 1 (placental lactogen); IK cytokine, down-regulator of HLA II; tumor necrosis factor (ligand) superfamily, member 9; sprouty homolog 2 (homolog of Drosophila); fibroblast growth factor 6; motilin; TEK tyrosine kinase, endothelial (venous malformations, multiple cutaneous and mucosal); cardiotrophin 1; FXYD domain containing ion transport regulator 5; WNT inhibitory factor 1; intercellular adhesion molecule 3; GRB2-related adaptor protein 2; gonadotropin-releasing hormone 1 (leutinizing-releasing hormone); estrogen receptor 2 (ER beta); bone morphogenetic protein 2; WNT1 inducible signaling pathway protein 1; steroid-5-alpha-reductase, alpha polypeptide 2 (3-oxo-5 alpha-steroid delta 4-dehydrogenase alpha 2); calcitonin/calcitonin-related polypeptide, alpha; desmoplakin, tumor necrosis factor (ligand) superfamily, member 7; fibroblast growth factor 14;nitric oxide synthase 1 (neuronal); microsomal glutathione S-transferase 2; chemokine (C motif) ligand 1; thyrotropin-releasing hormone; protocadherin beta 6; interferon, alpha 4; epiregulin; proprotein convertase subtilisin/kexin type 2; CD209 antigen; chemokine (C-C motif) receptor 5; interleukin 9; nuclear receptor subfamily 5, group A, member 1; growth factor receptor-bound protein 10; crumbs homolog 1 (homolog of Drosophila); GRB2-related adaptor protein; pre-B-cell colony enhancing factor 1; chemokine (C-C motif) ligand 18 (pulmonary and activation-regulated); discs, large homolog 5 (homolog of Drosophila); angiotensinogen (serine (or cysteine) proteinase inhibitor, clade A (alpha-1 antiproteinase, antitrypsin), member 8); fibroblast growth factor 20; protocadherin beta 11; interleukin 17 (cytotoxic T-lymphocyte-associated serine esterase 8); nephronophthisis 1 (juvenile); ephrin-A2; somatostatin receptor 1; proprotein convertase subtilisin/kexin type 6; intercellular adhesion molecule 5, telencephalin; protocadherin beta 5; transforming growth factor, alpha; tumor necrosis factor (ligand) superfamily, member 10; chemokine (C-X-C motif) ligand 13 (B-cell chemoattractant); phosphoglucomutase 5; adrenergic, alpha-1D-, receptor; proopiomelanocortin (adrenocorticotropin/beta-lipotropin/alpha-melanocyte stimulating hormone/beta-melanocyte stimulating hormone/beta-endorphin); thyroid stimulating hormone, beta; agouti signaling protein, nonagouti homolog (homolog of mouse); interferon, alpha 10; phosphate regulating endopeptidase homolog, X-linked (hypophosphatemia, vitamin D resistant rickets); placental growth factor, vascular endothelial growth factor-related protein; prostaglandin I2 (prostacyclin) receptor (IP); inhibin, alpha; c-mer proto-oncogene tyrosine kinase; lymphotoxin beta (TNF superfamily, member 3); myeloid/lymphoid or mixed-lineage leukemia (trithorax homolog of Drosophila); translocated to, 4; CD209 antigen-like; endothelin 3; tumor necrosis factor receptor superfamily, member 11a, activator of NFKB; adrenergic, alpha-2B-, receptor; chemokine (C-X-C motif) ligand 12 (stromal cell-derived factor 1); wingless-type MMTV integration site family, member 8B; tumor necrosis factor (ligand) superfamily, member 18; chromosome 1 open reading frame 10; SH2 domain containing phosphatase anchor protein 1; tumor necrosis factor (ligand) superfamily, member 4 (tax-transcriptionally activated glycoprotein 1, 34 kDa); interleukin 11; interleukin 6 (interferon, beta 2); neuronal cell adhesion molecule; endometrial bleeding associated factor (left-right determination, factor A; transforming growth factor beta superfamily); chemokine (C-X-C motif) ligand 5; protocadherin 8; sialoadhesin; adrenomedullin; chemokine (C-C motif) ligand 1; ectonucleoside triphosphate diphosphohydrolase 1; wingless-type MMTV integration site family, member 5A; chemokine (C-C motif) ligand 17; chemokine (C-X-C motif) ligand 10; amphiregulin (schwannoma-derived growth factor); intercellular adhesion molecule 1 (CD54), human rhinovirus receptor; complement component 1, q subcomponent, receptor 1; furin (paired basic amino acid cleaving enzyme); erythropoietin; endothelial cell growth factor 1 (platelet-derived); neuromedin B; interleukin 22; neural cell adhesion molecule 1; thyroid stimulating hormone receptor; CD33 antigen (gp67); stromal interaction molecule 1; sema domain, immunoglobulin domain (Ig), transmembrane domain (TM) and short cytoplasmic domain, (semaphorin) 4F; ephrin-B2; growth differentiation factor 5 (cartilage-derived morphogenetic protein-1); insulin; chemokine (C-C motif) ligand 23; fibroblast growth factor binding protein 1; interleukin 10; secreted phosphoprotein 1 (osteopontin, bone sialoprotein I, early T-lymphocyte activation 1); proenkephalin; CD86 antigen (CD28 antigen ligand 2, B7-2 antigen); fibroblast growth factor 13; lactalbumin, alpha-; stanniocalcin 2; steroid-5-alpha-reductase, alpha polypeptide 1 (3-oxo-5 alpha-steroid delta 4-dehydrogenase alpha 1); wingless-type MMTV integration site family, member 3; stanniocalcin 1; chemokine (C-C motif) ligand 20; adenylate cyclase activating polypeptide 1 (pituitary); ephrin-B3; insulin-like 4 (placenta); FAT tumor suppressor homolog 1 (homolog of Drosophila); chemokine (C-C motif) ligand 16; nudix (nucleoside diphosphate linked moiety X)-type motif 3; interferon, alpha 21; integrin, beta 2 (antigen CD18 (p95), lymphocyte function-associated antigen 1; macrophage antigen 1 (mac-1) beta subunit); arginine vasopressin (neurophysin II, antidiuretic hormone, diabetes insipidus, neurohypophyseal); interferon, alpha 2; transcription factor AP-2 gamma (activating enhancer binding protein 2 gamma); interleukin 1 receptor-like 1 ligand; peptide YY; chemokine (C-C motif) ligand 15; WNT1 inducible signaling pathway protein 3; catenin (cadherin-associated protein), delta 1; junctional adhesion molecule 2; prostaglandin D2 synthase, hematopoietic; fibroblast growth factor 21; endothelin 1; CD44 antigen (homing function and Indian blood group system); CD2 antigen (p50), sheep red blood cell receptor; cysteine-rich secretory protein 3; discs, large (Drosophila) homolog-associated protein 1; endothelin 2; wingless-type MMTV integration site family, member 7A; carbohydrate (N-acetylglucosamine 6-O) sulfotransferase 4; platelet-derived growth factor alpha polypeptide; membrane metallo-endopeptidase (neutral endopeptidase, enkephalinase, CALLA, CD10); interleukin 3 (colony-stimulating factor, multiple); islet amyloid polypeptide; WNT1 inducible signaling pathway protein 2; interleukin 17B; major intrinsic protein of lens fiber; growth hormone releasing hormone; parathyroid hormone-like hormone; intercellular adhesion molecule 4, Landsteiner-Wiener blood group; ephrin-A3; protocadherin beta 3; sema domain, immunoglobulin domain,(Ig), short basic domain, secreted, (semaphorin) 3B; pro-melanin-concentrating hormone; neurotrophin 3; zyxin; interleukin 13; sialic acid binding Ig-like lectin 6; chemokine (C-C motif) ligand 27; interleukin 15; chorionic gonadotropin, beta polypeptide; Norrie disease (pseudoglioma); glycoprotein hormones, alpha polypeptide; tumor necrosis factor, alpha-induced protein 6; androgen receptor (dihydrotestosterone receptor; testicular feminization; spinal and bulbar muscular atrophy; Kennedy disease); chemokine (C-C motif) ligand 22; bone marrow stromal cell antigen 2; midkine (neurite growth-promoting factor 2); fibroblast growth factor 9 (glia-activating factor); wingless-type MMTV integration site family, member 11; SH2 domain protein 1A, Duncan's disease (lymphoproliferative syndrome); discs, large (homolog of Drosophila) homolog-associated protein 2; neogenin homolog 1 (homolog of chicken); a disintegrin and metalloproteinase domain 10; fibroblast growth factor 1 (acidic); CD97 antigen; small inducible cytokine subfamily E, member 1 (endothelial monocyte-activating); SH2 domain protein 1A, Duncan's disease (lymphoproliferative syndrome); inhibin, beta A (activin A, activin AB alpha polypeptide); parathyroid hormone; jagged 2; collagen, type XI, alpha 1; chemokine (C-C motif) ligand 11; interleukin 1 family, member 9; complement component 1, q subcomponent, alpha polypeptide; leukemia inhibitory factor (cholinergic differentiation factor); chemokine (C-C motif) ligand 21; hydroxysteroid (11-beta) dehydrogenase 2; chemokine (C-X-C motif) ligand 9; adrenergic, alpha-1B-, receptor; cocaine- and amphetamine-regulated transcript; interferon, alpha-inducible protein (clone IFI-15K); fibroblast growth factor 5; CD58 antigen, (lymphocyte function-associated antigen 3); interleukin 7; anti-Mullerian hormone; chemokine (C-C motif) ligand 13; proprotein convertase subtilisin/kexin type 1; interleukin 1, beta; interleukin 26; neuropilin 1; oncostatin M; sorbin and SH3 domain containing 1; S100 calcium binding protein A9 (calgranulin B); chemokine (C-C motif) ligand 24; interleukin 18 (interferon-gamma-inducing factor); and insulin-degrading enzyme.

[0087] Microarrays affecting translation in response to IMPDH inhibitors would include a plurality of genes selected from the group consisting of methionine-tRNA synthetase; alanyl-tRNA synthetase; solute carrier family 22 (organic cation transporter), member 17; tyrosyl-tRNA synthetase; histidyl-tRNA synthetase; seryl-tRNA synthetase; phenylalanine-tRNA synthetase 1 (mitochondrial); N-acylaminoacyl-peptide hydrolase; valyl-tRNA synthetase 2; aminoacylase 1; aspartoacylase (aminoacylase 2, Canavan disease); isoleucine-tRNA synthetase; arginyl-tRNA synthetase; transcription factor binding to IGHM enhancer 3; lysyl-tRNA synthetase; phenylalanine-tRNA synthetase-like, alpha subunit; threonyl-tRNA synthetase; cysteinyl-tRNA synthetase; tryptophanyl tRNA synthetase 2 (mitochondrial); glycyl-tRNA synthetase; asparaginyl-tRNA synthetase; glutaminyl-tRNA synthetase; solute carrier family 22 (organic cation transporter), member 17; aspartyl-tRNA synthetase; small inducible cytokine subfamily E, member 1 (endothelial monocyte-activating); glutamyl-prolyl-tRNA synthetase; lysyl-tRNA synthetase; and tryptophanyl-tRNA synthetase.

[0088] Microarrays that are specific for genes required for mitochondrial function that are responsive to IMPDH would include a plurality of geres selected from the group consisting of succinate dehydrogenase complex, subunit C, integral membrane protein, 15 kDa; mitochondrial ribosomal protein L3; malate dehydrogenase 2, NAD (mitochondrial); hexokinase 2; uncoupling protein 3 (mitochondrial, proton carrier); death associated protein 3; 4-aminobutyrate aminotransferase; ubiquinol-cytochrome c reductase binding protein; mitochondrial ribosomal protein L12; mitochondrial intermediate peptidase; ubiquinol-cytochrome c reductase complex (7.2 kD); translocase of inner mitochondrial membrane 17 homolog A (yeast); ATP-binding cassette, sub-family F (GCN20), member 2; ATP synthase, H+ transporting, mitochondrial F0 complex, subunit F6; solute carrier family 25 (mitochondrial carrier, brain), member 14; thiosulfate sulfurtransferase (rhodanese); cytochrome c oxidase subunit VIa polypeptide 2; BH3 interacting domain death agonist; aldehyde dehydrogenase 4 family, member A1; translocase of outer mitochondrial membrane 40 homolog (yeast); heat shock 60 kDa protein 1 (chaperonin); mercaptopyruvate sulfurtransferase; NADH dehydrogenase (ubiquinone) Fe—S protein 6, 13 kDa (NADH-coenzyme Q reductase); NADH dehydrogenase (ubiquinone) 1 beta subcomplex, 2, 8 kDa; mitochondrial ribosomal protein S12; glycerol kinase; NADH dehydrogenase (ubiquinone) Fe—S protein 4, 18 kDa (NADH-coenzyme Q reductase); myeloid cell leukemia sequence 1 (BCL2-related); NADH dehydrogenase (ubiquinone) 1, subcomplex unknown, 2, 14.5 kDa; translocase of inner mitochondrial membrane 22 homolog (homolog of yeast); acyl-Coenzyme A dehydrogenase, C-4 to C-12 straight chain; solute carrier family 25 (mitochondrial carrier; phosphate carrier), member 3; cytochrome c oxidase subunit Vb; popeye domain containing 2; peptidase (mitochondrial processing) beta; mitochondrial ribosomal protein L23; NADH dehydrogenase (ubiquinone) Fe—S protein 1, 75 kDa (NADH-coenzyme Q reductase); dynamin 1-like; translocase of inner mitochondrial membrane 13 homolog (yeast); NADH dehydrogenase (ubiquinone) 1 alpha subcomplex, 6, 14 kDa; cytochrome c oxidase subunit VIa polypeptide 1; sarcosine dehydrogenase; B-cell CLL/lymphoma 2; voltage-dependent anion channel 1; 3-hydroxymethyl-3-methylglutaryl-Coenzyme A lyase (hydroxymethylglutaricaciduria); BCL2-associated X protein; NADH dehydrogenase (ubiquinone) 1, subcomplex unknown, 1, 6 kDa; omithine aminotransferase (gyrate atrophy); camitine palmitoyltransferase II; solute carrier family 25 (mitochondrial oxodicarboxylate carrier), member 21; monoamine oxidase B; NADH dehydrogenase (ubiquinone) Fe—S protein 2, 49 kDa (NADH-coenzyme Q reductase); ornithine carbamoyltransferase; NADH dehydrogenase (ubiquinone) 1 beta subcomplex, 5, 16 kDa; ubiquinol-cytochrome c reductase core protein I; solute carrier family 25 (mitochondrial carrier; omithine transporter) member 15; surfeit 1; voltage-dependent anion channel 3; hydroxyacyl-Coenzyme A dehydrogenase/3-ketoacyl-Coenzyme A thiolase/enoyl-Coenzyme A hydratase (trifunctional protein), beta subunit; translocase of inner mitochondrial membrane 8 homolog B (homolog of yeast); ubiquinol-cytochrome c reductase (6.4 kD) subunit; electron-transferring-flavoprotein dehydrogenase; NADH dehydrogenase (ubiquinone) Fe—S protein 8, 23 kDa (NADH-coenzyme Q reductase); NADH dehydrogenase (ubiquinone) 1 beta subcomplex, 3, 12 kDa; phosphoprotein enriched in astrocytes 15 [BLAST]; carbonic anhydrase VA, mitochondrial; NADH dehydrogenase (ubiquinone) Fe—S protein 5, 15 kDa (NADH-coenzyme Q reductase); inner membrane protein, mitochondrial (mitofilin); translocase of inner mitochondrial membrane 9 homolog (yeast); oxidase (cytochrome c) assembly 1-like; transcription factor A, mitochondrial; translocase of outer mitochondrial membrane 20 homolog (homolog of yeast); DnaJ (Hsp40) homolog, subfamily A, member 3; NADH dehydrogenase (ubiquinone) 1 beta subcomplex, 6, 17 kDa; endothelial cell growth factor 1 (platelet-derived); hypothetical protein LOC114971; NADH dehydrogenase (ubiquinone) flavoprotein 1, 51 kDa; electron-transfer-flavoprotein, beta polypeptide; transcription factor A, mitochondrial; mitochondrial folate transporter/carrier; NADH dehydrogenase (ubiquinone) 1 alpha subcomplex, 9, 39 kDa; v-raf-1 murine leukemia viral oncogene homolog 1; ubiquinol-cytochrome c reductase core protein II; solute carrier family 25 (mitochondrial carrier; peroxisomal membrane protein, 34 kDa), member 17; NADH dehydrogenase (ubiquinone) 1 beta subcomplex, 8, 19 kDa; uncoupling protein 1 (mitochondrial, proton carrier); START domain containing 3; BCL2-antagonist/killer 1; nicotinamide nucleotide transhydrogenase; translocase of outer mitochondrial membrane 34; holocytochrome c synthase (cytochrome c heme-lyase); mitochondrial carrier family protein; ATP-binding cassette, sub-family B (MDR/TAP), member 8; BCL2-antagonist of cell death; cytochrome c oxidase subunit IV isoform 2; succinate dehydrogenase complex, subunit D, integral membrane protein; solute carrier family 25 (camitine/acylcamitine translocase), member 20; solute carrier family 25 (mitochondrial carrier; oxoglutarate carrier), member 11; translocase of inner mitochondrial membrane 17 homolog B (yeast); solute carrier family 25 (mitochondrial carrier, Aralar), member 12; uncoupling protein 2 (mitochondrial, proton carrier); NADH dehydrogenase (ubiquinone) 1 alpha subcomplex, 5, 13 kDa; cytochrome c-1; methylcrotonoyl-Coenzyme A carboxylase 1 (alpha); NADH dehydrogenase (ubiquinone) 1 beta subcomplex, 4, 15 kDa; isovaleryl Coenzyme A dehydrogenase; mitochondrial ribosomal protein S15; benzodiazapine receptor (peripheral); fracture callus 1 homolog (homolog of rat); protein (peptidyl-prolyl cis/trans isomerase) NIMA-interacting, 4 (parvulin); cytochrome c oxidase subunit VIIb; metaxin 2; mitochondrial ribosomal protein L40; NADH dehydrogenase (ubiquinone) flavoprotein 2, 24 kDa; translocase of inner mitochondrial membrane 44 homolog (yeast); translocase of inner mitochondrial membrane 23 homolog (homolog of yeast); electron-transfer-flavoprotein, alpha polypeptide (glutaric aciduria II); solute carrier family 25, and member 13 (citrin).

[0089] Microarrays that are specific for genes from cGMP biosynthesis pathway that are responsive to IMPDH inhibitors would include a plurality of genes selected from the group consisting of guanylate cyclase 1, soluble, beta 3; natriuretic peptide receptor B/guanylate cyclase B (atrionatriuretic peptide receptor B); protein kinase, cGMP-dependent, type II; phosphodiesterase 6B, cGMP-specific, rod, beta (congenital stationary night blindness 3, autosomal dominant); phosphodiesterase 6C, cGMP-specific, cone, alpha prime; phosphodiesterase 6A, cGMP-specific, rod, alpha; guanylate cyclase 2F, retinal; natriuretic peptide receptor A/guanylate cyclase A (atrionatriuretic peptide receptor A); guanylate cyclase 1, soluble, alpha 2; phosphodiesterase 3B, cGMP-inhibited; phosphodiesterase 9A; phosphodiesterase 3B, cGMP-inhibited; guanylate cyclase 2D, membrane (retina-specific); phosphodiesterase 2A, cGMP-stimulated; cyclic nucleotide gated channel alpha 3; phosphodiesterase 6G, cGMP-specific, rod, gamma; phosphodiesterase 6H, cGMP-specific, cone, gamma; cyclic nucleotide gated channel alpha 1; and phosphodiesterase 3A, cGMP-inhibited.

[0090] Microarrays that are specific for genes from cAMP biosynthesis pathway that are responsive to IMPDH inhibitors would include a plurality of genes selected from the group consisting of phosphodiesterase 4D, cAMP-specific (phosphodiesterase E3 dunce homolog of Drosophila); cholinergic receptor, muscarinic 2; adenylate cyclase 7; protein kinase, cGMP-dependent, type I; adenylate cyclase 6; Rap guanine nucleotide exchange factor (GEF) 3; glucagon-like peptide 2 receptor; protein kinase, X-linked; melanocortin 4 receptor; adrenergic, beta-3-, receptor; calcitonin/calcitonin-related polypeptide, alpha; phosphodiesterase 4B, cAMP-specific (phosphodiesterase E4 dunce homolog, Drosophila); cAMP responsive element modulator; adenylate cyclase 3; calcium-binding tyrosine-(Y)-phosphorylation regulated (fibrousheathin 2); adrenergic, alpha-1D-, receptor; protein kinase, AMP-activated, gamma 1 non-catalytic subunit; cyclic nucleotide gated channel beta 1; chemokine (C-C motif) receptor 3; testicular soluble adenylyl cyclase; adenylate cyclase 8 (brain); phosphodiesterase 7B; protein kinase, cAMP-dependent, catalytic, alpha; adrenomedullin; Rap guanine nucleotide exchange factor (GEF) 2; A kinase (PRKA) anchor protein 4; adenylate cyclase 9; Rap guanine nucleotide exchange factor (GEF) 4; phosphodiesterase 4C, cAMP-specific (phosphodiesterase E1 dunce homolog of Drosophila); prostaglandin E receptor 4 (subtype EP4); G protein-coupled receptor kinase 5; protein kinase (cAMP-dependent, catalytic) inhibitor alpha; galanin receptor 2; protein kinase, cAMP-dependent, regulatory, type I, alpha (tissue specific extinguisher 1); arginine vasopressin receptor 2 (nephrogenic diabetes insipidus); protein kinase, cAMP-dependent, catalytic, beta; corticotropin releasing hormone receptor 2; growth hormone releasing hormone; parathyroid hormone-like hormone; adenosine A2a receptor; protein kinase, cAMP-dependent, regulatory, type II, alpha; corticotropin releasing hormone receptor 1; parathyroid hormone; hyperpolarization activated cyclic nucleotide-gated potassium channel 2; adrenergic, alpha-1B-, receptor; ret proto-oncogene (multiple endocrine neoplasia and medullary thyroid carcinoma 1, Hirschsprung disease); phosphodiesterase 4A, cAMP-specific (phosphodiesterase E2 dunce homolog of Drosophila); protein kinase, cAMP-dependent, regulatory, type II, beta; and protein kinase (cAMP-dependent, catalytic) inhibitor gamma.

[0091] The term “microarray” refers to an ordered arrangement of hybridizable array elements (i.e., the above-described polynucleotide probes). The array elements are arranged so that there are preferably at least one or more different array elements, more preferably at least 100 array elements, and most preferably at least 1,000 array elements, on a 1 cm² substrate surface. The hybridization signal from each of the array elements is individually distinguishable. In a preferred embodiment, the array elements comprise polynucleotide probes.

[0092] A “polynucleotide” refers to a chain of nucleotides, preferably a single-stranded chain. Preferably, the chain has from about 75 to 10,000 nucleotides, more preferably from about 100 to 3,500 nucleotides. The term “probe” refers to a polynucleotide sequence capable of hybridizing with a target sequence to form a polynucleotide probe/target complex. A “target polynucleotide” refers to a chain of nucleotides to which a polynucleotide probe can hybridize by base pairing. In some instances, the sequences will be complementary (no mismatches) when aligned. In other instances, there may be up to a 10%. mismatch.

[0093] A “plurality” is given its ordinary meaning of 2 or more. In the present context, a plurality of polynucleotide probes (elements) refers preferably to a group of at least least 4, 5, 10, 15, 20, 25, 30, 35, 40, 50, 60, 70, 80, 90, 100, 110, 120, 130, 140, 150, 200, 300 or more polynucleotides or more elements, more preferably to a group of at least about 100, and even more preferably to a group of at least about 1,000, elements. The maximum number of members is unlimited, but is at least about 100,000 members.

[0094] The term “gene” or “genes” refers to polynucleotide sequence of a gene which may be the partial or complete gene and may comprise regulatory, untranslated, or coding regions.

[0095] The microarray can be used for large-scale genetic or gene expression analysis of a number of target polynucleotides. The microarray can also be used in the diagnosis of diseases and in the monitoring of treatments. Further, the microarray can be employed to investigate an individual's predisposition to a disease. Furthermore, the microarray can be employed to investigate cellular responses to carcinogens, mitogens, drug treatment, and the like.

[0096] The hybridizable array elements in a microarray of the invention may be organized in an ordered fashion so that each element is present at a specified location on the substrate. As such, each of the nucleic acids on the array will have its own “address” such that hybridization to that nucleic acid will allow specific identification of the complementary nucleic acid in a biological sample. Because the array elements are at specified locations on the substrate, the hybridization patterns and intensities can be interpreted in terms of expression levels of particular genes. Collectively, the expression profile obtained with the microarrays of the invention are tightly correlated to a particular disease or condition or treatment. Hence, the invention provides dramatically enhanced reliability in profiling and obtaining prognostic indicators of response to IMPDH inhibition.

[0097] The composition comprising a plurality of polynucleotide probes can also be used to purify a subpopulation of mRNAs, cDNAs, genomic fragments and the like, in a sample. This may be particularly useful in identifying subsets of the above-identified nucleic acids that are more highly indicative of modulated/abnormal IMPDH activity.

[0098] The nucleic acids identified herein as being responsive to IMPDH inhibition will be used in microarray production and can be genomic DNA or cDNA or mRNA, or any RNA-like or DNA-like material, such as peptide nucleic acids, branched DNAs and the like. The polynucleotide probes can be sense or antisense polynucleotide probes. Where target polynucleotides are double-stranded, the probes may be either sense or antisense strands. Where the target polynucleotides are single-stranded, the nucleotide probes are complementary single strands.

[0099] In one embodiment, the polynucleotide probes are cDNAs. The size of the DNA sequence of interest may vary and is preferably from 20 to 10,000 nucleotides, more preferably from 20 to 200 nucleotides. The polynucleotide probes can be prepared by a variety of synthetic or enzymatic schemes which are well known in the art. The probes can be synthesized, in whole or in part, using chemical methods well known in the art Caruthers et al. (1980) Nucleic Acids Res. Symp. Ser. 215-233). Alternatively, the probes can be generated, in whole or in part, enzymatically.

[0100] Nucleotide analogues can be incorporated into the polynucleotide probes by methods well known in the art. The only requirement is that the incorporated nucleotide analogues must serve to base pair with target polynucleotide sequences. For example, certain guanine nucleotides can be substituted with hypoxanthine which base pairs with cytosine residues. However, these base pairs are less stable than those between guanine and cytosine. Alternatively, adenine nucleotides can be substituted with 2,6-diaminopurine which can form stronger base pairs than those between adenine and thymidine.

[0101] Additionally, the polynucleotide probes can include nucleotides that have been derivatized chemically or enzymatically. Typical chemical modifications include derivatization with acyl, alkyl, aryl or amino groups.

[0102] The polynucleotide probes can be immobilized on a substrate. Preferred substrates are any suitable rigid or semi-rigid support including membranes, filters, chips, slides, wafers, fibers, magnetic or nonmagnetic beads, gels, tubing, plates, polymers, microparticles and capillaries. The substrate can have a variety of surface forms, such as wells, trenches, pins, channels and pores, to which the polynucleotide probes are bound. Preferably, the substrates are optically transparent.

[0103] Complementary DNA (cDNA) can be arranged and then immobilized on a substrate. The probes can be immobilized by covalent means such as by chemical bonding procedures or UV. In one such method, a cDNA is bound to a glass surface which has been modified to contain epoxide or aldehyde groups. In another case, a cDNA probe is placed on a polylysine coated surface and then UV cross-linked (Shalon et al. PCT publication WO95/35505, herein incorporated by reference). In yet another method, a DNA is actively transported from a solution to a given position on a substrate by electrical means (Heller et al. U.S. Pat. No. 5,605,662). Alternatively, individual DNA clones can be gridded on a filter.

[0104] Furthermore, the probes do not have to be directly bound to the substrate, but rather can be bound to the substrate through a linker group. The linker groups are typically about 6 to 50 atoms long to provide exposure to the attached polynucleotide probe. Preferred linker groups include ethylene glycol oligomers, diamines, diacids and the like. Reactive groups on the substrate surface react with one of the terminal portions of the linker to bind the linker to the substrate. The other terminal portion of the linker is then functionalized for binding the polynucleotide probe.

[0105] The polynucleotide probes can be attached to a substrate by dispensing reagents for probe synthesis on the substrate surface or by dispensing preformed DNA fragments or clones on the substrate surface. Typical dispensers include a micropipette delivering solution to the substrate with a robotic system to control the position of the micropipette with respect to the substrate. There can be a multiplicity of dispensers so that reagents can be delivered to the reaction regions simultaneously.

[0106] Hybridization of Nitcleic Acids from Biological Sample to Microarray. In order to detect the presence of a given nucleic acid in a biological sample it will be desirable to hybridize the nucleic acid isolated from that sample to the microarray. Hybridization causes a denatured polynucleotide probe and a denatured complementary target to form a stable duplex through base pairing. Hybridization methods are well known to those skilled in the art (See, e.g., Ausubel (1997; Short Protocols in Molecular Biology, John Wiley & Sons, New York N.Y., units 2.8-2.11, 3.18-3.19 and 4-6-4.9). Conditions can be selected for hybridization where exactly complementary target and polynucleotide probe can hybridize, i.e., each base pair must interact with its complementary base pair. Alternatively, conditions can be selected where target and polynucleotide probes have mismatches but are still able to hybridize. Suitable conditions can be selected, for example, by varying the concentrations of salt in the prehybridization, hybridization and wash solutions, or by varying the hybridization and wash temperatures. With some membranes, the temperature can be decreased by adding formamide to the prehybridization and hybridization solutions.

[0107] Hybridization can be performed at low stringency with buffers, such as 6 x SSPE with 0.005% Triton X-100 at 37° C., which permits hybridization between target and polynucleotide probes that contain some mismatches to form target polynucleotide/probe complexes. Subsequent washes are performed at higher stringency with buffers, such as 0.5×SSPE with 0.005% Triton X-100 at 50° C., to retain hybridization of only those target/probe complexes that contain exactly complementary sequences. Alternatively, hybridization can be performed with buffers, such as 5×SSC/0.2% SDS at 60° C. and washes are performed in 2×SSC/0.2% SDS and then in 0.1×SSC. Background signals can be reduced by the use of detergent, such as sodium dodecyl sulfate, Sarcosyl or Triton X-100, or a blocking agent, such as salmon sperm DNA.

[0108] After hybridization, the microarray is washed to remove nonhybridized nucleic acids, and complex formation between the hybridizable array elements and the target polynucleotides is detected. Methods for detecting complex formation are well known to those skilled in the art. In a preferred embodiment, the target polynucleotides are labeled with a fluorescent label, and measurement of levels and patterns of fluorescence indicative of complex formation is accomplished by fluorescence microscopy, preferably confocal fluorescence microscopy. An argon ion laser excites the fluorescent label, emissions are directed to a photomultiplier, and the amount of emitted light is detected and quantitated. The detected signal should be proportional to the amount of probe/target polynucleotide complex at each position of the microarray. The fluorescence microscope can be associated with a computer-driven scanner device to generate a quantitative two-dimensional image of hybridization intensity. The scanned image is examined to determine the abundance/expression level of each hybridized target polynucleotide.

[0109] Typically, microarray fluorescence intensities can be normalized to take into account variations in hybridization intensities when more than one microarray is used under similar test conditions. In a preferred embodiment, individual polynucleotide probe/target complex hybridization intensities are normalized using the intensities derived from internal normalization controls contained on each microarray.

[0110] Microarray Expression Profiles. As discussed above an important aspect of the present invention is a method of obtaining an expression profile, using the microarray compositions of the invention, of a subject that has or is about to undergo therapy based on IMPDH inhibition. The expression profile can be used to detect changes in the expression of genes in response to such inhibition and to provide a prognosis of a patient's response to an IMPDH inhibitor comprising the steps of: (a) subjecting RNA extracted from the cells obtained from the patient to gene expression analysis on one of the microarrays of the invention in the presence and absence of said IMPDH inhibitor. In doing so, the expression level of at least one gene selected from the genes in Tables I through VIII is determined and compared to the amount of expression found in a corresponding reference tissue set that has not been treated with an IMPDH inhibitor. Subsequently, a report summarizing the data obtained by such gene expression analysis can be prepared and used to determine whether the patient will likely be responsive to IMPDH inhibition.

[0111] The expression profile comprises determining the level of expression the nucleic acids that have been identified herein as being responsive to IMPDH inhibition and may further involve categorizing said nucleic acids into functional categories (e.g., the gene has a cell-cycle function, a cell proliferation function, is involved in lipid metabolism some other metabolic pathway, and the like). It is contemplated that at least one of the nucleic acids identified herein, and preferably a plurality thereof, is hybridized to a complementary target polynucleotide forming at least one, and preferably a plurality, of complexes. A complex is preferably detected by incorporating at least one labeling moiety in the complex as described above. The expression profiles provide “snapshots” that can show unique expression patterns that are characteristic of that individual's response to IMPDH inhibition.

[0112] After performing hybridization experiments and interpreting detected signals from a microarray, particular polynucleotide probes can be identified and selected based on their expression patterns (e.g., those that are consistently and dramatically up- or down-regulated upon IMPDH inhibition). Such polynucleotide probe sequences can be used to clone a full length sequence of the gene for further analysis, provide an alternative diagnostic tool, or to produce the encoded polypeptide.

[0113] In one situation, the microarray is used to monitor the progression of disease and the response of that disease to IMPDH inhibition. Researchers can assess and catalog the differences in gene expression between healthy and diseased tissues or cells. By analyzing changes in patterns of gene expression, disease can be diagnosed at earlier stages before the patient is symptomatic. The invention can also be used to monitor the efficacy of treatment. For some treatments with known side effects, the microarray is employed to “fine tune” the treatment regimen. A dosage of IMPDH inhibitor is established that causes a change in genetic expression patterns indicative of successful treatment. Expression patterns associated with undesirable side effects are avoided. This approach may be more sensitive and rapid than waiting for the patient to show inadequate improvement, or to manifest side effects, before altering the course of treatment.

[0114] Alternatively, animal models which mimic a disease, rather than patients having the disease, can be used to characterize expression profiles associated with a particular inhibitor. This gene expression data may be useful in diagnosing and monitoring the course of disease in a patient, in determining gene targets for intervention, and in testing treatment regimens.

[0115] Also, researchers can use the microarray to rapidly screen large numbers of candidate IMPDH inhibitory drug molecules, looking for ones that produce an expression profile similar to those of known therapeutic drugs e.g., VX-944, MPA, Nucleoside analogs such as tiazofurin, ribavirin and mizoribine, and other agents listed in e.g., U.S. Pat. Nos. 5,807,876, 5,932,600, 6,054,472, 6,344,465, 6,395,763, 6,399,773, 6,420,403, 6,867,299, 6,826,488, 6,825,224, 6,653,309, 6,624,184, 6,617,323, 6,541,496, 6,518,291, and 6,498,178 (each specifically incorporated herein by reference in its entirety for its teaches of IMPDH inhibitor compositions and methods of administering the same for the treatment of IMPDH related disorders), with the expectation that molecules with the same expression profile will have similar therapeutic effects. Thus, the invention provides the means to determine the molecular mode of action of an IPDH inhibitor or IMPDH pathway inhibitor, as well as to facilitate identification of new such drugs.

### EXAMPLES

[0116] The following examples are included to demonstrate certain embodiments of the invention. It should be appreciated by those of skill in the art that the techniques disclosed in the examples which follow represent techniques discovered by the inventor to function well in the practice of the invention, and thus are considered to constitute certain aspects for its practice. However, those of skill in the art should, in light of the present disclosure, appreciate that many changes can be made in the specific embodiments which are disclosed and still obtain a like or similar result without departing from the spirit and scope of the invention.

### Example 1

### VX-944-Biomarker Identification by Transcript Profiling

[0117] Inosine monophosphate dehydrogenase (IMPDH) catalyzes a rate-limiting step in guanine nucleotide biosynthesis, the NAD-dependent reduction of IMP to XMP. Inhibition of IMPDH activity results in the cessation of DNA synthesis and is an important target for immunosuppressive, anticancer and antiviral therapy.

[0118] Mycophenolate mofetil, an approved immunosuppressive agent (CellCept® from Roche) used for the prevention of kidney, heart or liver transplant rejections is the 2-morpholinoethyl ester of mycophenolic acid (MPA). VX-944 is currently being developed for the treatment of hematological malignancies. Both MPA and VX-944 are selective inhibitors of IMPDH with VX-944 being 3-4 fold more potent in cell assays (see FIG. 1).

| IC50 values in uM | VX-944 | MPA | VX-497 |
|---|---|---|---|
| PBMCs PHA-T cell IC50 | 0.021 | 0.089 | 0.105 |
| PHA-T cell IC50 in the presence of | 7.8 | >20 | 6.5 |
| guanosine | | | |
| Ratio of PHA-T cell IC50 in the | 373 | >224 | 62 |
| presence and absence of guanosine | | | |

[0119] In order to arrive at the conclusion that the expression of certain nucleic acids is modulated in response to IMPDH inhibition, the following inhibitors were employed:

[chemical structure]

[0120] The above agents were tested in HL-60 cells at a concentration of 500 nM for VX-944 and 1000 nM for MPA or with 0.1% DMSO as the vehicle control. The cells were harvested at 14 or 30 hours post addition of compound or vehicle. Briefly, the culture medium was removed at the appropriate time-points and the cells washed with PBS. The cells were then harvested, and pelleted by-gentle centrifugation. The supernatant was discarded and the pellets snap-frozen on an ethanol/dry-ice slurry. RNA was isolated from cells by using a RNEasy kit from Qiagen. RNAs were quality controlled using the Agilent 2100 Bioanalyzer to determine the presence of RNAs.

[0121] The results from the Affymetrix array analyses are summarized in the Table below. Data from the arrays corresponding to VX-944 and MPA at the two time-points—14 hours (Early) and 30 hours (Late) were analyzed using Spotfire™, microarray data analysis software. Some of the data analysis parameters used are outlined below:

[0122] a) All the arrays were normalized by using trimmed means, with a 5% exclusion limit

[0123] b) Only genes present in at least 5 of the 6 chips used for the analyses were included in the genesets

[0124] c) Only statistically significant genes (ANOVA, p<0.05) were included in the final analyses to generate gene lists.

| | Number of Genes | | |
|---|---|---|---|
| | Upregulated | Downregulated | Total |
| VX-944: treated vs. DMSO (early) | 172 | 119 | 291 |
| VX-944: treated vs. DMSO (late) | 434 | 0 | 434 |
| MPA: treated vs. DMSO (early) | 105 | 0 | 105 |
| MPA: treated vs. DMSO (late) | 602 | 560 | 1162 |
| VX-944 (early) vs. MPA (early) | 77 | 0 | 77 |
| VX-944 (late) vs. MPA (late) | 335 | 0 | 335 |
| VX-944 (early) vs. VX-944 (late) | 102 | 0 | 102 |
| MPA (early) vs. MPA (late) | 66 | 0 | 66 |
| VX-944 (Early and Late) vs MPA | 43 | 0 | 43 |
| (early and late) | | | |

[0125] A global view of datasets identified by comparing VX-944 and MPA at the early (14 h) time-point showed that there were 77 genes in common between VX-944 and MPA. At the late (30 h) time-point, 335 genes were identified as overlapping between the VX-944 and MPA datasets. A global view of datasets identified by comparing VX-944 and MPA at the two time-points, 14 h (EARLY) and 30 h (LATE) showed that with VX-944 102 genes modulated at the early time-point were also modulated at the late time-point. With MPA 66 genes are in common between the two time-points. As to a comparison between the two data sets, of the 102 genes modulated by VX-944 and the 66 genes modulated by MPA, 43 genes modulated at 14 hours were also modulated at 30 hours. To add additional value to the gene lists and provide additional information to the investigator, the genes underlying each of these expression patterns was queried against publicly available databases. These databases included Locus Link, Gene Cards, KEGG, GO annotations, OMIM, PubMed. The information gathered from such an analysis is organized below in data tables.

[0126] VX-944 (Early) vs. MPA (Early): 77 genes were found to be common between these two comparisons. These genes were further assigned to the following functional categories:

| CATEGORY | NUMBER of Genes |
|---|---|
| nucleobase, nucleoside, nucleotide | 13 |
| and nucleic acid metabolism | |
| protein metabolism | 10 |
| response to biotic stimulus | 10 |
| biosynthesis | 9 |
| signal transduction | 9 |
| cell proliferation | 8 |
| lipid metabolism | 8 |
| response to pest/pathogen/parasite | 7 |
| response to wounding | 7 |
| organic acid metabolism | 6 |
| cell adhesion | 5 |
| organogenesis | 5 |
| catabolism | 4 |
| cell-cell signaling | 4 |
| electron transport | 4 |
| carbohydrate metabolism | 3 |
| cell death | 3 |
| cell organization and biogenesis | 3 |
| energy pathways | 3 |
| phosphorus metabolism | 3 |
| programmed cell death | 3 |
| transport | 3 |
| unclassified | 30 |

[0127] Interestingly, for this dataset a large number of genes were classified into the Nucleotide metabolism functional category. Some of the other major categories include protein metabolism, response to biotic stimulus, biosynthesis, signal transduction, cell proliferation, lipid metabolism and response to pest/pathogen/parasite. However, 30/77 genes could not be readily classified using the GO functional categorization. Even with these genes, every effort has been made to provide as much information as possible.

The genes in some of these categories are shown below:

### Nucleotide Metabolism

| | LOCUS | | |
|---|---|---|---|
| AFFX_ID | LINK | GENE NAME | CLASSIFICATION |
| 205042_at | 10020 | UDP-N-acetylglucosamine-2-epimerase/N- | alcohol metabolism |
| | | acetylmannosamine kinase | |
| 201612_at | 223 | aldehyde dehydrogenase 9 family, member A1 | aldehyde metabolism |
| 205042_at | 10020 | UDP-N-acetylglucosamine-2-epimerase/N- | amine metabolism |
| | | acetylmannosamine kinase | |
| 210942_s_at | 10402 | alpha2,3-sialyltransferase | amine metabolism |
| 205042_at | 10020 | UDP-N-acetylglucosamine-2-epimerase/N- | biosynthesis |
| | | acetylmannosamine kinase | |
| 210942_s_at | 10402 | alpha2,3-sialyltransferase | biosynthesis |
| 219649_at | 29929 | dolichyl-P-Glc:Man9GlcNAc2-PP- | biosynthesis |
| | | dolichylglucosyltransferase | |
| 200962_at | 6160 | ribosomal protein L31 | biosynthesis |
| 204446_s_at | 240 | arachidonate 5-lipoxygenase | biosynthesis |
| 204174_at | 241 | arachidonate 5-lipoxygenase-activating protein | biosynthesis |
| 202912_at | 133 | adrenomedullin | biosynthesis |
| 204044_at | 23475 | quinolinate phosphoribosyltransferase (nicotinate- | biosynthesis |
| | | nucleotide pyrophosphorylase (carboxylating)) | |
| 208771_s_at | 4048 | leukotriene A4 hydrolase | biosynthesis |
| 205042_at | 10020 | UDP-N-acetylglucosamine-2-epimerase/N- | carbohydrate metabolism |
| | | acetylmannosamine kinase | |
| 210942_s_at | 10402 | alpha2,3-sialyltransferase | carbohydrate metabolism |
| 202499_s_at | 6515 | solute carrier family 2 (facilitated glucose | carbohydrate metabolism |
| | | transporter), member 3 | |
| 205042_at | 10020 | UDP-N-acetylglucosamine-2-epimerase/N- | catabolism |
| | | acetylmannosamine kinase | |
| 208771_s_at | 4048 | leukotriene A4 hydrolase | catabolism |
| 212190_at | 5270 | serine (or cysteine) proteinase inhibitor, clade E | catabolism |
| | | (nexin, plasminogen activator inhibitor type 1), | |
| | | member 2 | |
| 218875_s_at | 26271 | F-box only protein 5 | catabolism |
| 205042_at | 10020 | UDP-N-acetylglucosamine-2-epimerase/N- | cell adhesion |
| | | acetylmannosamine kinase | |
| 211506_s_at | 3576 | interleukin 8 | cell adhesion |
| 203336_s_at | 9270 | integrin cytoplasmic domain-associated protein 1 | cell adhesion |
| 216250_s_at | 9404 | leupaxin | cell adhesion |
| 219890_at | 23601 | C-type (calcium dependent, carbohydrate- | cell adhesion |
| | | recognition domain) lectin, superfamily member 5 | |
| 214727_at | 675 | breast cancer 2, early onset | cell death |
| 201710_at | 4605 | v-myb myeloblastosis viral oncogene homolog | cell death |
| | | (avian)-like 2 | |
| 204614_at | 5055 | serine (or cysteine) proteinase inhibitor, clade B | cell death |
| | | (ovalbumin), member 2 | |
| 212190_at | 5270 | serine (or cysteine) proteinase inhibitor, clade E | cell migration |
| | | (nexin, plasminogen activator inhibitor type 1), | |
| | | member 2 | |
| 214727_at | 675 | breast cancer 2, early onset | cell organization and biogenesis |
| 201714_at | 7283 | tubulin, gamma 1 | cell organization and biogenesis |
| 201999_s_at | 6993 | t-complex-associated-testis-expressed 1-like 1 | cell organization and biogenesis |
| 1053_at | 5982 | replication factor C (activator 1) 2, 40 kDa | cell proliferation |
| 205053_at | 5557 | primase, polypeptide 1, 49 kDa | cell proliferation |
| 214727_at | 675 | breast cancer 2, early onset | cell proliferation |
| 209773_s_at | 6241 | ribonucleotide reductase M2 polypeptide | cell proliferation |
| 211506_s_at | 3576 | interleukin 8 | cell proliferation |
| 201710_at | 4605 | v-myb myeloblastosis viral oncogene homolog | cell proliferation |
| | | (avian)-like 2 | |
| 200660_at | 6282 | S100 calcium binding protein A11 (calgizzarin) | cell proliferation |
| 201641_at | 684 | bone marrow stromal cell antigen 2 | cell proliferation |
| 211506_s_at | 3576 | interleukin 8 | cell-cell signaling |
| 202912_at | 133 | adrenomedullin | cell-cell signaling |
| 201641_at | 684 | bone marrow stromal cell antigen 2 | cell-cell signaling |
| 204044_at | 23475 | quinolinate phosphoribosyltransferase (nicotinate- | cell-cell signaling |
| | | nucleotide pyrophosphorylase (carboxylating)) | |
| 204044_at | 23475 | quinolinate phosphoribosyltransferase (nicotinate- | coenzymes and prosthetic group |
| | | nucleotide pyrophosphorylase (carboxylating)) | metabolism |
| 203923_s_at | 1536 | cytochrome b-245, beta polypeptide (chronic | electron transport |
| | | granulomatous disease) | |
| 204446_s_at | 240 | arachidonate 5-lipoxygenase | electron transport |
| 202437_s_at | 1545 | cytochrome P450, family 1, subfamily B, | electron transport |
| | | polypeptide 1 | |
| 206662_at | 2745 | glutaredoxin (thioltransferase) | electron transport |
| 205042_at | 10020 | UDP-N-acetylglucosamine-2-epimerase/N- | energy pathways |
| | | acetylmannosamine kinase | |
| 203923_s_at | 1536 | cytochrome b-245, beta polypeptide (chronic | energy pathways |
| | | granulomatous disease) | |
| 204044_at | 23475 | quinolinate phosphoribosyltransferase (nicotinate- | energy pathways |
| | | nucleotide pyrophosphorylase (carboxylating)) | |
| 202912_at | 133 | adrenomedullin | hormone metabolism |
| 205042_at | 10020 | UDP-N-acetylglucosamine-2-epimerase/N- | lipid metabolism |
| | | acetylmannosamine kinase | |
| 210942_s_at | 10402 | alpha2,3-sialyltransferase | lipid metabolism |
| 204446_s_at | 240 | arachidonate 5-lipoxygenase | lipid metabolism |
| 204174_at | 241 | arachidonate 5-lipoxygenase-activating protein | lipid metabolism |
| 202912_at | 133 | adrenomedullin | lipid metabolism |
| 201963_at | 2180 | fatty-acid-Coenzyme A ligase, long-chain 2 | lipid metabolism |
| 208771_s_at | 4048 | leukotriene A4 hydrolase | lipid metabolism |
| 207275_s_at | 2179 | fatty-acid-Coenzyme A ligase, long-chain 1 | lipid metabolism |
| 1053_at | 5982 | replication factor C (activator 1) 2, 40 kDa | nucleobase, nucleoside, nucleotide |
| | | | and nucleic acid metabolism |
| 205042_at | 10020 | UDP-N-acetylglucosamine-2-epimerase/N- | nucleobase, nucleoside, nucleotide |
| | | acetylmannosamine kinase | and nucleic acid metabolism |
| 218258_at | 51082 | polymerase (RNA) I polypeptide D, 16 kDa | nucleobase, nucleoside, nucleotide |
| | | | and nucleic acid metabolism |
| 205053_at | 5557 | primase, polypeptide 1, 49 kDa | nucleobase, nucleoside, nucleotide |
| | | | and nucleic acid metabolism |
| 203409_at | 1643 | damage-specific DNA binding protein 2, 48 kDa | nucleobase, nucleoside, nucleotide |
| | | | and nucleic acid metabolism |
| 214727_at | 675 | breast cancer 2, early onset | nucleobase, nucleoside, nucleotide |
| | | | and nucleic acid metabolism |
| 209773_s_at | 6241 | ribonucleotide reductase M2 polypeptide | nucleobase, nucleoside, nucleotide |
| | | | and nucleic acid metabolism |
| 202678_at | 2958 | general transcription factor IIA, 2, 12 kDa | nucleobase, nucleoside, nucleotide |
| | | | and nucleic acid metabolism |
| 201710_at | 4605 | v-myb myeloblastosis viral oncogene homolog | nucleobase, nucleoside, nucleotide |
| | | (avian)-like 2 | and nucleic acid metabolism |
| 202912_at | 133 | adrenomedullin | nucleobase, nucleoside, nucleotide |
| | | | and nucleic acid metabolism |
| 200660_at | 6282 | S100 calcium binding protein A11 (calgizzarin) | nucleobase, nucleoside, nucleotide |
| | | | and nucleic acid metabolism |
| 209930_s_at | 4778 | nuclear factor (erythroid-derived 2), 45 kDa | nucleobase, nucleoside, nucleotide |
| | | | and nucleic acid metabolism |
| 201989_s_at | 1389 | cAMP responsive element binding protein-like 2 | nucleobase, nucleoside, nucleotide |
| | | | and nucleic acid metabolism |

### Protein Metabolism

| | LOCUS | | |
|---|---|---|---|
| AFFX_ID | LINK | GENE NAME | CLASSIFICATION |
| 205042_at | 10020 | UDP-N-acetylglucosamine-2-epimerase/N- | alcohol metabolism |
| | | acetylmannosamine kinase | |
| 201612_at | 223 | aldehyde dehydrogenase 9 family, member | aldehyde metabolism |
| | | A1 | |
| 205042_at | 10020 | UDP-N-acetylglucosamine-2-epimerase/N- | amine metabolism |
| | | acetylmannosamine kinase | |
| 210942_s_at | 10402 | alpha2,3-sialyltransferase | amine metabolism |
| 205042_at | 10020 | UDP-N-acetylglucosamine-2-epimerase/N- | biosynthesis |
| | | acetylmannosamine kinase | |
| 210942_s_at | 10402 | alpha2,3-sialyltransferase | biosynthesis |
| 219649_at | 29929 | dolichyl-P-Glc:Man9GlcNAc2-PP- | biosynthesis |
| | | dolichylglucosyltransferase | |
| 200962_at | 6160 | ribosomal protein L31 | biosynthesis |
| 204446_s_at | 240 | arachidonate 5-lipoxygenase | biosynthesis |
| 204174_at | 241 | arachidonate 5-lipoxygenase-activating | biosynthesis |
| | | protein | |
| 202912_at | 133 | adrenomedullin | biosynthesis |
| 204044_at | 23475 | quinolinate phosphoribosyltransferase | biosynthesis |
| | | (nicotinate-nucleotide pyrophosphorylase | |
| | | (carboxylating)) | |
| 208771_s_at | 4048 | leukotriene A4 hydrolase | biosynthesis |
| 205042_at | 10020 | UDP-N-acetylglucosamine-2-epimerase/N- | carbohydrate metabolism |
| | | acetylmannosamine kinase | |
| 210942_s_at | 10402 | alpha2,3-sialyltransferase | carbohydrate metabolism |
| 202499_s_at | 6515 | solute carrier family 2 (facilitated glucose | carbohydrate metabolism |
| | | transporter), member 3 | |
| 205042_at | 10020 | UDP-N-acetylglucosamine-2-epimerase/N- | catabolism |
| | | acetylmannosamine kinase | |
| 208771_s_at | 4048 | leukotriene A4 hydrolase | catabolism |
| 212190_at | 5270 | serine (or cysteine) proteinase inhibitor, | catabolism |
| | | clade E (nexin, plasminogen activator | |
| | | inhibitor type 1), member 2 | |
| 218875_s_at | 26271 | F-box only protein 5 | catabolism |
| 205042_at | 10020 | UDP-N-acetylglucosamine-2-epimerase/N- | cell adhesion |
| | | acetylmannosamine kinase | |
| 211506_s_at | 3576 | interleukin 8 | cell adhesion |
| 203336_s_at | 9270 | integrin cytoplasmic domain-associated | cell adhesion |
| | | protein 1 | |
| 216250_s_at | 9404 | leupaxin | cell adhesion |
| 219890_at | 23601 | C-type (calcium dependent, carbohydrate- | cell adhesion |
| | | recognition domain) lectin, superfamily | |
| | | member 5 | |
| 214727_at | 675 | breast cancer 2, early onset | cell death |
| 201710_at | 4605 | v-myb myeloblastosis viral oncogene | cell death |
| | | homolog (avian)-like 2 | |
| 204614_at | 5055 | serine (or cysteine) proteinase inhibitor, | cell death |
| | | clade B (ovalbumin), member 2 | |
| 212190_at | 5270 | serine (or cysteine) proteinase inhibitor, | cell migration |
| | | clade E (nexin, plasminogen activator | |
| | | inhibitor type 1), member 2 | |
| 214727_at | 675 | breast cancer 2, early onset | cell organization and biogenesis |
| 201714_at | 7283 | tubulin, gamma 1 | cell organization and biogenesis |
| 201999_s_at | 6993 | t-complex-associated-testis-expressed 1- | cell organization and biogenesis |
| | | like 1 | |
| 1053_at | 5982 | replication factor C (activator 1) 2, 40 kDa | cell proliferation |
| 205053_at | 5557 | primase, polypeptide 1, 49 kDa | cell proliferation |
| 214727_at | 675 | breast cancer 2, early onset | cell proliferation |
| 209773_s_at | 6241 | ribonucleotide reductase M2 polypeptide | cell proliferation |
| 211506_s_at | 3576 | interleukin 8 | cell proliferation |
| 201710_at | 4605 | v-myb myeloblastosis viral oncogene | cell proliferation |
| | | homolog (avian)-like 2 | |
| 200660_at | 6282 | S100 calcium binding protein A11 | cell proliferation |
| | | (calgizzarin) | |
| 201641_at | 684 | bone marrow stromal cell antigen 2 | cell proliferation |
| 211506_s_at | 3576 | interleukin 8 | cell-cell signaling |
| 202912_at | 133 | adrenomedullin | cell-cell signaling |
| 201641_at | 684 | bone marrow stromal cell antigen 2 | cell-cell signaling |
| 204044_at | 23475 | quinolinate phosphoribosyltransferase | cell-cell signaling |
| | | (nicotinate-nucleotide pyrophosphorylase | |
| | | (carboxylating)) | |
| 204044_at | 23475 | quinolinate phosphoribosyltransferase | coenzymes and prosthetic |
| | | (nicotinate-nucleotide pyrophosphorylase | group metabolism |
| | | (carboxylating)) | |
| 203923_s_at | 1536 | cytochrome b-245, beta polypeptide | electron transport |
| | | (chronic granulomatous disease) | |
| 204446_s_at | 240 | arachidonate 5-lipoxygenase | electron transport |
| 202437_s_at | 1545 | cytochrome P450, family 1, subfamily B, | electron transport |
| | | polypeptide 1 | |
| 206662_at | 2745 | glutaredoxin (thioltransferase) | electron transport |
| 205042_at | 10020 | UDP-N-acetylglucosamine-2-epimerase/N- | energy pathways |
| | | acetylmannosamine kinase | |
| 203923_s_at | 1536 | cytochrome b-245, beta polypeptide | energy pathways |
| | | (chronic granulomatous disease) | |
| 204044_at | 23475 | quinolinate phosphoribosyltransferase | energy pathways |
| | | (nicotinate-nucleotide pyrophosphorylase | |
| | | (carboxylating)) | |
| 202912_at | 133 | adrenomedullin | hormone metabolism |
| 205042_at | 10020 | UDP-N-acetylglucosamine-2-epimerase/N- | lipid metabolism |
| | | acetylmannosamine kinase | |
| 210942_s_at | 10402 | alpha2,3-sialyltransferase | lipid metabolism |
| 204446_s_at | 240 | arachidonate 5-lipoxygenase | lipid metabolism |
| 204174_at | 241 | arachidonate 5-lipoxygenase-activating | lipid metabolism |
| | | protein | |
| 202912_at | 133 | adrenomedullin | lipid metabolism |
| 201963_at | 2180 | fatty-acid-Coenzyme A ligase, long-chain 2 | lipid metabolism |
| 208771_s_at | 4048 | leukotriene A4 hydrolase | lipid metabolism |
| 207275_s_at | 2179 | fatty-acid-Coenzyme A ligase, long-chain 1 | lipid metabolism |
| 1053_at | 5982 | replication factor C (activator 1) 2, 40 kDa | nucleobase, nucleoside, |
| | | | nucleotide and nucleic acid |
| | | | metabolism |
| 205042_at | 10020 | UDP-N-acetylglucosamine-2-epimerase/N- | nucleobase, nucleoside, |
| | | acetylmannosamine kinase | nucleotide and nucleic acid |
| | | | metabolism |
| 218258_at | 51082 | polymerase (RNA) I polypeptide D, 16 kDa | nucleobase, nucleoside, |
| | | | nucleotide and nucleic acid |
| | | | metabolism |
| 205053_at | 5557 | primase, polypeptide 1, 49 kDa | nucleobase, nucleoside, |
| | | | nucleotide and nucleic acid |
| | | | metabolism |
| 203409_at | 1643 | damage-specific DNA binding protein 2, | nucleobase, nucleoside, |
| | | 48 kDa | nucleotide and nucleic acid |
| | | | metabolism |
| 214727_at | 675 | breast cancer 2, early onset | nucleobase, nucleoside, |
| | | | nucleotide and nucleic acid |
| | | | metabolism |
| 209773_s_at | 6241 | ribonucleotide reductase M2 polypeptide | nucleobase, nucleoside, |
| | | | nucleotide and nucleic acid |
| | | | metabolism |
| 202678_at | 2958 | general transcription factor IIA, 2, 12 kDa | nucleobase, nucleoside, |
| | | | nucleotide and nucleic acid |
| | | | metabolism |
| 201710_at | 4605 | v-myb myeloblastosis viral oncogene | nucleobase, nucleoside, |
| | | homolog (avian)-like 2 | nucleotide and nucleic acid |
| | | | metabolism |
| 202912_at | 133 | adrenomedullin | nucleobase, nucleoside, |
| | | | nucleotide and nucleic acid |
| | | | metabolism |
| 200660_at | 6282 | S100 calcium binding protein A11 | nucleobase, nucleoside, |
| | | (calgizzarin) | nucleotide and nucleic acid |
| | | | metabolism |
| 209930_s_at | 4778 | nuclear factor (erythroid-derived 2), 45 kDa | nucleobase, nucleoside, |
| | | | nucleotide and nucleic acid |
| | | | metabolism |
| 201989_s_at | 1389 | cAMP responsive element binding protein- | nucleobase, nucleoside, |
| | | like 2 | nucleotide and nucleic acid |
| | | | metabolism |
| 205042_at | 10020 | UDP-N-acetylglucosamine-2-epimerase/N- | organic acid metabolism |
| | | acetylmannosamine kinase | |
| 204446_s_at | 240 | arachidonate 5-lipoxygenase | organic acid metabolism |
| 204174_at | 241 | arachidonate 5-lipoxygenase-activating | organic acid metabolism |
| | | protein | |
| 201963_at | 2180 | fatty-acid-Coenzyme A ligase, long-chain 2 | organic acid metabolism |
| 208771_s_at | 4048 | leukotriene A4 hydrolase | organic acid metabolism |
| 207275_s_at | 2179 | fatty-acid-Coenzyme A ligase, long-chain 1 | organic acid metabolism |
| 206734_at | 8690 | jerky homolog-like (mouse) | organogenesis |
| 211506_s_at | 3576 | interleukin 8 | organogenesis |
| 205807_s_at | 7286 | tuftelin 1 | organogenesis |
| 218224_at | 9240 | paraneoplastic antigen MA1 | organogenesis |
| 202437_s_at | 1545 | cytochrome P450, family 1, subfamily B, | organogenesis |
| | | polypeptide 1 | |
| 205807_s_at | 7286 | tuftelin 1 | ossification |
| 202437_s_at | 1545 | cytochrome P450, family 1, subfamily B, | perception of external stimulus |
| | | polypeptide 1 | |
| 202933_s_at | 7525 | v-yes-1 Yamaguchi sarcoma viral | phosphorus metabolism |
| | | oncogene homolog 1 | |
| 209457_at | 1847 | dual specificity phosphatase 5 | phosphorus metabolism |
| 209585_s_at | 9562 | multiple inositol polyphosphate histidine | phosphorus metabolism |
| | | phosphatase, 1 | |
| 214727_at | 675 | breast cancer 2, early onset | programmed cell death |
| 201710_at | 4605 | v-myb myeloblastosis viral oncogene | programmed cell death |
| | | homolog (avian)-like 2 | |
| 204614_at | 5055 | serine (or cysteine) proteinase inhibitor, | programmed cell death |
| | | clade B (ovalbumin), member 2 | |
| 205042_at | 10020 | UDP-N-acetylglucosamine-2-epimerase/N- | protein metabolism |
| | | acetylmannosamine kinase | |
| 202933_s_at | 7525 | v-yes-1 Yamaguchi sarcoma viral oncogene | protein metabolism |
| | | homolog 1 | |
| 209457_at | 1847 | dual specificity phosphatase 5 | protein metabolism |
| 210942_s_at | 10402 | alpha2,3-sialyltransferase | protein metabolism |
| 219649_at | 29929 | dolichyl-P-Glc:Man9GlcNAc2-PP- | protein metabolism |
| | | dolichylglucosyltransferase | |
| 200962_at | 6160 | ribosomal protein L31 | protein metabolism |
| 216250_s_at | 9404 | leupaxin | protein metabolism |
| 208771_s_at | 4048 | leukotriene A4 hydrolase | protein metabolism |
| 212190_at | 5270 | serine (or cysteine) proteinase inhibitor, clade E | protein metabolism |
| | | (nexin, plasminogen activator inhibitor type 1), | |
| | | member 2 | |
| 218875_s_at | 26271 | F-box only protein 5 | protein metabolism |

### Response to Biotic Stimulus

| | LOCUS | | |
|---|---|---|---|
| AFFX_ID | LINK | GENE NAME | CLASSIFICATION |
| 205042_at | 10020 | UDP-N-acetylglucosamine-2-epimerase/N- | alcohol metabolism |
| | | acetylmannosamine kinase | |
| 201612_at | 223 | aldehyde dehydrogenase 9 family, member | aldehyde metabolism |
| | | A1 | |
| 205042_at | 10020 | UDP-N-acetylglucosamine-2-epimerase/N- | amine metabolism |
| | | acetylmannosamine kinase | |
| 210942_s_at | 10402 | alpha2,3-sialyltransferase | amine metabolism |
| 205042_at | 10020 | UDP-N-acetylglucosamine-2-epimerase/N- | biosynthesis |
| | | acetylmannosamine kinase | |
| 210942_s_at | 10402 | alpha2,3-sialyltransferase | biosynthesis |
| 219649_at | 29929 | dolichyl-P-Glc:Man9GlcNAc2-PP- | biosynthesis |
| | | dolichylglucosyltransferase | |
| 200962_at | 6160 | ribosomal protein L31 | biosynthesis |
| 204446_s_at | 240 | arachidonate 5-lipoxygenase | biosynthesis |
| 204174_at | 241 | arachidonate 5-lipoxygenase-activating | biosynthesis |
| | | protein | |
| 202912_at | 133 | adrenomedullin | biosynthesis |
| 204044_at | 23475 | quinolinate phosphoribosyltransferase | biosynthesis |
| | | (nicotinate-nucleotide pyrophosphorylase | |
| | | (carboxylating)) | |
| 208771_s_at | 4048 | leukotriene A4 hydrolase | biosynthesis |
| 205042_at | 10020 | UDP-N-acetylglucosamine-2-epimerase/N- | carbohydrate metabolism |
| | | acetylmannosamine kinase | |
| 210942_s_at | 10402 | alpha2,3-sialyltransferase | carbohydrate metabolism |
| 202499_s_at | 6515 | solute carrier family 2 (facilitated glucose | carbohydrate metabolism |
| | | transporter), member 3 | |
| 205042_at | 10020 | UDP-N-acetylglucosamine-2-epimerase/N- | catabolism |
| | | acetylmannosamine kinase | |
| 208771_s_at | 4048 | leukotriene A4 hydrolase | catabolism |
| 212190_at | 5270 | serine (or cysteine) proteinase inhibitor, | catabolism |
| | | clade E (nexin, plasminogen activator | |
| | | inhibitor type 1), member 2 | |
| 218875_s_at | 26271 | F-box only protein 5 | catabolism |
| 205042_at | 10020 | UDP-N-acetylglucosamine-2-epimerase/N- | cell adhesion |
| | | acetylmannosamine kinase | |
| 211506_s_at | 3576 | interleukin 8 | cell adhesion |
| 203336_s_at | 9270 | integrin cytoplasmic domain-associated | cell adhesion |
| | | protein 1 | |
| 216250_s_at | 9404 | leupaxin | cell adhesion |
| 219890_at | 23601 | C-type (calcium dependent, carbohydrate- | cell adhesion |
| | | recognition domain) lectin, superfamily | |
| | | member 5 | |
| 214727_at | 675 | breast cancer 2, early onset | cell death |
| 201710_at | 4605 | v-myb myeloblastosis viral oncogene | cell death |
| | | homolog (avian)-like 2 | |
| 204614_at | 5055 | serine (or cysteine) proteinase inhibitor, | cell death |
| | | clade B (ovalbumin), member 2 | |
| 212190_at | 5270 | serine (or cysteine) proteinase inhibitor, | cell migration |
| | | clade E (nexin, plasminogen activator | |
| | | inhibitor type 1), member 2 | |
| 214727_at | 675 | breast cancer 2, early onset | cell organization and biogenesis |
| 201714_at | 7283 | tubulin, gamma 1 | cell organization and biogenesis |
| 201999_s_at | 6993 | t-complex-associated-testis-expressed 1- | cell organization and biogenesis |
| | | like 1 | |
| 1053_at | 5982 | replication factor C (activator 1) 2, 40 kDa | cell proliferation |
| 205053_at | 5557 | primase, polypeptide 1, 49 kDa | cell proliferation |
| 214727_at | 675 | breast cancer 2, early onset | cell proliferation |
| 209773_s_at | 6241 | ribonucleotide reductase M2 polypeptide | cell proliferation |
| 211506_s_at | 3576 | interleukin 8 | cell proliferation |
| 201710_at | 4605 | v-myb myeloblastosis viral oncogene | cell proliferation |
| | | homolog (avian)-like 2 | |
| 200660_at | 6282 | S100 calcium binding protein A11 | cell proliferation |
| | | (calgizzarin) | |
| 201641_at | 684 | bone marrow stromal cell antigen 2 | cell proliferation |
| 211506_s_at | 3576 | interleukin 8 | cell-cell signaling |
| 202912_at | 133 | adrenomedullin | cell-cell signaling |
| 201641_at | 684 | bone marrow stromal cell antigen 2 | cell-cell signaling |
| 204044_at | 23475 | quinolinate phosphoribosyltransferase | cell-cell signaling |
| | | (nicotinate-nucleotide pyrophosphorylase | |
| | | (carboxylating)) | |
| 204044_at | 23475 | quinolinate phosphoribosyltransferase | coenzymes and prosthetic |
| | | (nicotinate-nucleotide pyrophosphorylase | group metabolism |
| | | (carboxylating)) | |
| 203923_s_at | 1536 | cytochrome b-245, beta polypeptide | electron transport |
| | | (chronic granulomatous disease) | |
| 204446_s_at | 240 | arachidonate 5-lipoxygenase | electron transport |
| 202437_s_at | 1545 | cytochrome P450, family 1, subfamily B, | electron transport |
| | | polypeptide 1 | |
| 206662_at | 2745 | glutaredoxin (thioltransferase) | electron transport |
| 205042_at | 10020 | UDP-N-acetylglucosamine-2-epimerase/N- | energy pathways |
| | | acetylmannosamine kinase | |
| 203923_s_at | 1536 | cytochrome b-245, beta polypeptide | energy pathways |
| | | (chronic granulomatous disease) | |
| 204044_at | 23475 | quinolinate phosphoribosyltransferase | energy pathways |
| | | (nicotinate-nucleotide pyrophosphorylase | |
| | | (carboxylating)) | |
| 202912_at | 133 | adrenomedullin | hormone metabolism |
| 205042_at | 10020 | UDP-N-acetylglucosamine-2-epimerase/N- | lipid metabolism |
| | | acetylmannosamine kinase | |
| 210942_s_at | 10402 | alpha2,3-sialyltransferase | lipid metabolism |
| 204446_s_at | 240 | arachidonate 5-lipoxygenase | lipid metabolism |
| 204174_at | 241 | arachidonate 5-lipoxygenase-activating | lipid metabolism |
| | | protein | |
| 202912_at | 133 | adrenomedullin | lipid metabolism |
| 201963_at | 2180 | fatty-acid-Coenzyme A ligase, long-chain 2 | lipid metabolism |
| 208771_s_at | 4048 | leukotriene A4 hydrolase | lipid metabolism |
| 207275_s_at | 2179 | fatty-acid-Coenzyme A ligase, long-chain 1 | lipid metabolism |
| 1053_at | 5982 | replication factor C (activator 1) 2, 40 kDa | nucleobase, nucleoside, |
| | | | nucleotide and nucleic acid |
| | | | metabolism |
| 205042_at | 10020 | UDP-N-acetylglucosamine-2-epimerase/N- | nucleobase, nucleoside, |
| | | acetylmannosamine kinase | nucleotide and nucleic acid |
| | | | metabolism |
| 218258_at | 51082 | polymerase (RNA) I polypeptide D, 16 kDa | nucleobase, nucleoside, |
| | | | nucleotide and nucleic acid |
| | | | metabolism |
| 205053_at | 5557 | primase, polypeptide 1, 49 kDa | nucleobase, nucleoside, |
| | | | nucleotide and nucleic acid |
| | | | metabolism |
| 203409_at | 1643 | damage-specific DNA binding protein 2, | nucleobase, nucleoside, |
| | | 48 kDa | nucleotide and nucleic acid |
| | | | metabolism |
| 214727_at | 675 | breast cancer 2, early onset | nucleobase, nucleoside, |
| | | | nucleotide and nucleic acid |
| | | | metabolism |
| 209773_s_at | 6241 | ribonucleotide reductase M2 polypeptide | nucleobase, nucleoside, |
| | | | nucleotide and nucleic acid |
| | | | metabolism |
| 202678_at | 2958 | general transcription factor IIA, 2, 12 kDa | nucleobase, nucleoside, |
| | | | nucleotide and nucleic acid |
| | | | metabolism |
| 201710_at | 4605 | v-myb myeloblastosis viral oncogene | nucleobase, nucleoside, |
| | | homolog (avian)-like 2 | nucleotide and nucleic acid |
| | | | metabolism |
| 202912_at | 133 | adrenomedullin | nucleobase, nucleoside, |
| | | | nucleotide and nucleic acid |
| | | | metabolism |
| 200660_at | 6282 | S100 calcium binding protein A11 | nucleobase, nucleoside, |
| | | (calgizzarin) | nucleotide and nucleic acid |
| | | | metabolism |
| 209930_s_at | 4778 | nuclear factor (erythroid-derived 2), 45 kDa | nucleobase, nucleoside, |
| | | | nucleotide and nucleic acid |
| | | | metabolism |
| 201989_s_at | 1389 | cAMP responsive element binding protein- | nucleobase, nucleoside, |
| | | like 2 | nucleotide and nucleic acid |
| | | | metabolism |
| 205042_at | 10020 | UDP-N-acetylglucosamine-2-epimerase/N- | organic acid metabolism |
| | | acetylmannosamine kinase | |
| 204446_s_at | 240 | arachidonate 5-lipoxygenase | organic acid metabolism |
| 204174_at | 241 | arachidonate 5-lipoxygenase-activating | organic acid metabolism |
| | | protein | |
| 201963_at | 2180 | fatty-acid-Coenzyme A ligase, long-chain 2 | organic acid metabolism |
| 208771_s_at | 4048 | leukotriene A4 hydrolase | organic acid metabolism |
| 207275_s_at | 2179 | fatty-acid-Coenzyme A ligase, long-chain 1 | organic acid metabolism |
| 206734_at | 8690 | jerky homolog-like (mouse) | organogenesis |
| 211506_s_at | 3576 | interleukin 8 | organogenesis |
| 205807_s_at | 7286 | tuftelin 1 | organogenesis |
| 218224_at | 9240 | paraneoplastic antigen MA1 | organogenesis |
| 202437_s_at | 1545 | cytochrome P450, family 1, subfamily B, | organogenesis |
| | | polypeptide 1 | |
| 205807_s_at | 7286 | tuftelin 1 | ossification |
| 202437_s_at | 1545 | cytochrome P450, family 1, subfamily B, | perception of external stimulus |
| | | polypeptide 1 | |
| 202933_s_at | 7525 | v-yes-1 Yamaguchi sarcoma viral | phosphorus metabolism |
| | | oncogene homolog 1 | |
| 209457_at | 1847 | dual specificity phosphatase 5 | phosphorus metabolism |
| 209585_s_at | 9562 | multiple inositol polyphosphate histidine | phosphorus metabolism |
| | | phosphatase, 1 | |
| 214727_at | 675 | breast cancer 2, early onset | programmed cell death |
| 201710_at | 4605 | v-myb myeloblastosis viral oncogene | programmed cell death |
| | | homolog (avian)-like 2 | |
| 204614_at | 5055 | serine (or cysteine) proteinase inhibitor, | programmed cell death |
| | | clade B (ovalbumin), member 2 | |
| 205042_at | 10020 | UDP-N-acetylglucosamine-2-epimerase/N- | protein metabolism |
| | | acetylmannosamine kinase | |
| 202933_s_at | 7525 | v-yes-1 Yamaguchi sarcoma viral | protein metabolism |
| | | oncogene homolog 1 | |
| 209457_at | 1847 | dual specificity phosphatase 5 | protein metabolism |
| 210942_s_at | 10402 | alpha2,3-sialyltransferase | protein metabolism |
| 219649_at | 29929 | dolichyl-P-Glc:Man9GlcNAc2-PP- | protein metabolism |
| | | dolichylglucosyltransferase | |
| 200962_at | 6160 | ribosomal protein L31 | protein metabolism |
| 216250_s_at | 9404 | leupaxin | protein metabolism |
| 208771_s_at | 4048 | leukotriene A4 hydrolase | protein metabolism |
| 212190_at | 5270 | serine (or cysteine) proteinase inhibitor, | protein metabolism |
| | | clade E (nexin, plasminogen activator | |
| | | inhibitor type 1), member 2 | |
| 218875_s_at | 26271 | F-box only protein 5 | protein metabolism |
| 212190_at | 5270 | serine (or cysteine) proteinase inhibitor, | regulation of metabolism |
| | | clade E (nexin, plasminogen activator | |
| | | inhibitor type 1), member 2 | |
| 205557_at | 671 | bactericidal/permeability-increasing protein | response to abiotic stimulus |
| 202437_s_at | 1545 | cytochrome P450, family 1, subfamily B, | response to abiotic stimulus |
| | | polypeptide 1 | |
| 211506_s_at | 3576 | interleukin 8 | response to biotic stimulus |
| 205557_at | 671 | bactericidal/permeability-increasing protein | response to biotic stimulus |
| 203923_s_at | 1536 | cytochrome b-245, beta polypeptide (chronic | response to biotic stimulus |
| | | granulomatous disease) | |
| 204446_s_at | 240 | arachidonate 5-lipoxygenase | response to biotic stimulus |
| 204174_at | 241 | arachidonate 5-lipoxygenase-activating protein | response to biotic stimulus |
| 202912_at | 133 | adrenomedullin | response to biotic stimulus |
| 201641_at | 684 | bone marrow stromal cell antigen 2 | response to biotic stimulus |
| 208771_s_at | 4048 | leukotriene A4 hydrolase | response to biotic stimulus |
| 209575_at | 3588 | interleukin 10 receptor, beta | response to biotic stimulus |
| 216950_s_at | 2209 | Fc fragment of IgG, high affinity Ia, receptor for | response to biotic stimulus |
| | | (CD64) | |

### Biosynthesis

| | LOCUS | | |
|---|---|---|---|
| AFFX_ID | LINK | GENE NAME | CLASSIFICATION |
| 205042_at | 10020 | UDP-N-acetylglucosamine-2-epimerase/N- | alcohol metabolism |
| | | acetylmannosamine kinase | |
| 201612_at | 223 | aldehyde dehydrogenase 9 family, member | aldehyde metabolism |
| | | A1 | |
| 205042_at | 10020 | UDP-N-acetylglucosamine-2-epimerase/N- | amine metabolism |
| | | acetylmannosamine kinase | |
| 210942_s_at | 10402 | alpha2,3-sialyltransferase | amine metabolism |
| 205042_at | 10020 | UDP-N-acetylglucosamine-2-epimerase/N- | biosynthesis |
| | | acetylmannosamine kinase | |
| 210942_s_at | 10402 | alpha2,3-sialyltransferase | biosynthesis |
| 219649_at | 29929 | dolichyl-P-Glc:Man9GlcNAc2-PP- | biosynthesis |
| | | dolichylglucosyltransferase | |
| 200962_at | 6160 | ribosomal protein L31 | biosynthesis |
| 204446_s_at | 240 | arachidonate 5-lipoxygenase | biosynthesis |
| 204174_at | 241 | arachidonate 5-lipoxygenase-activating protein | biosynthesis |
| 202912_at | 133 | adrenomedullin | biosynthesis |
| 204044_at | 23475 | quinolinate phosphoribosyltransferase | biosynthesis |
| | | (nicotinate-nucleotide pyrophosphorylase | |
| | | (carboxylating)) | |
| 208771_s_at | 4048 | leukotriene A4 hydrolase | biosynthesis |

### Signal Transduction

| | LOCUS | | |
|---|---|---|---|
| AFFX_ID | LINK | GENE NAME | CLASSIFICATION |
| 205042_at | 10020 | UDP-N-acetylglucosamine-2- | alcohol metabolism |
| | | epimerase/N-acetylmannosamine kinase | |
| 201612_at | 223 | aldehyde dehydrogenase 9 family, | aldehyde metabolism |
| | | member A1 | |
| 205042_at | 10020 | UDP-N-acetylglucosamine-2- | amine metabolism |
| | | epimerase/N-acetylmannosamine kinase | |
| 210942_s_at | 10402 | alpha2,3-sialyltransferase | amine metabolism |
| 205042_at | 10020 | UDP-N-acetylglucosamine-2- | biosynthesis |
| | | epimerase/N-acetylmannosamine kinase | |
| 210942_s_at | 10402 | alpha2,3-sialyltransferase | biosynthesis |
| 219649_at | 29929 | dolichyl-P-Glc:Man9GlcNAc2-PP- | biosynthesis |
| | | dolichylglucosyltransferase | |
| 200962_at | 6160 | ribosomal protein L31 | biosynthesis |
| 204446_s_at | 240 | arachidonate 5-lipoxygenase | biosynthesis |
| 204174_at | 241 | arachidonate 5-lipoxygenase-activating | biosynthesis |
| | | protein | |
| 202912_at | 133 | adrenomedullin | biosynthesis |
| 204044_at | 23475 | quinolinate phosphoribosyltransferase | biosynthesis |
| | | (nicotinate-nucleotide pyrophosphorylase | |
| | | (carboxylating)) | |
| 208771_s_at | 4048 | leukotriene A4 hydrolase | biosynthesis |
| 205042_at | 10020 | UDP-N-acetylglucosamine-2- | carbohydrate metabolism |
| | | epimerase/N-acetylmannosamine kinase | |
| 210942_s_at | 10402 | alpha2,3-sialyltransferase | carbohydrate metabolism |
| 202499_s_at | 6515 | solute carrier family 2 (facilitated glucose | carbohydrate metabolism |
| | | transporter), member 3 | |
| 205042_at | 10020 | UDP-N-acetylglucosamine-2- | catabolism |
| | | epimerase/N-acetylmannosamine kinase | |
| 208771_s_at | 4048 | leukotriene A4 hydrolase | catabolism |
| 212190_at | 5270 | serine (or cysteine) proteinase inhibitor, | catabolism |
| | | clade E (nexin, plasminogen activator | |
| | | inhibitor type 1), member 2 | |
| 218875_s_at | 26271 | F-box only protein 5 | catabolism |
| 205042_at | 10020 | UDP-N-acetylglucosamine-2- | cell adhesion |
| | | epimerase/N-acetylmannosamine kinase | |
| 211506_s_at | 3576 | interleukin 8 | cell adhesion |
| 203336_s_at | 9270 | integrin cytoplasmic domain-associated | cell adhesion |
| | | protein 1 | |
| 216250_s_at | 9404 | leupaxin | cell adhesion |
| 219890_at | 23601 | C-type (calcium dependent, | cell adhesion |
| | | carbohydrate-recognition domain) lectin, | |
| | | superfamily member 5 | |
| 214727_at | 675 | breast cancer 2, early onset | cell death |
| 201710_at | 4605 | v-myb myeloblastosis viral oncogene | cell death |
| | | homolog (avian)-like 2 | |
| 204614_at | 5055 | serine (or cysteine) proteinase inhibitor, | cell death |
| | | clade B (ovalbumin), member 2 | |
| 212190_at | 5270 | serine (or cysteine) proteinase inhibitor, | cell migration |
| | | clade E (nexin, plasminogen activator | |
| | | inhibitor type 1), member 2 | |
| 214727_at | 675 | breast cancer 2, early onset | cell organization and biogenesis |
| 201714_at | 7283 | tubulin, gamma 1 | cell organization and biogenesis |
| 201999_s_at | 6993 | t-complex-associated-testis-expressed 1- | cell organization and biogenesis |
| | | like 1 | |
| 1053_at | 5982 | replication factor C (activator 1) 2, 40 kDa | cell proliferation |
| 205053_at | 5557 | primase, polypeptide 1, 49 kDa | cell proliferation |
| 214727_at | 675 | breast cancer 2, early onset | cell proliferation |
| 209773_s_at | 6241 | ribonucleotide reductase M2 polypeptide | cell proliferation |
| 211506_s_at | 3576 | interleukin 8 | cell proliferation |
| 201710_at | 4605 | v-myb myeloblastosis viral oncogene | cell proliferation |
| | | homolog (avian)-like 2 | |
| 200660_at | 6282 | S100 calcium binding protein A11 | cell proliferation |
| | | (calgizzarin) | |
| 201641_at | 684 | bone marrow stromal cell antigen 2 | cell proliferation |
| 211506_s_at | 3576 | interleukin 8 | cell-cell signaling |
| 202912_at | 133 | adrenomedullin | cell-cell signaling |
| 201641_at | 684 | bone marrow stromal cell antigen 2 | cell-cell signaling |
| 204044_at | 23475 | quinolinate phosphoribosyltransferase | cell-cell signaling |
| | | (nicotinate-nucleotide pyrophosphorylase | |
| | | (carboxylating)) | |
| 204044_at | 23475 | quinolinate phosphoribosyltransferase | coenzymes and prosthetic |
| | | (nicotinate-nucleotide pyrophosphorylase | group metabolism |
| | | (carboxylating)) | |
| 203923_s_at | 1536 | cytochrome b-245, beta polypeptide | electron transport |
| | | (chronic granulomatous disease) | |
| 204446_s_at | 240 | arachidonate 5-lipoxygenase | electron transport |
| 202437_s_at | 1545 | cytochrome P450, family 1, subfamily B, | electron transport |
| | | polypeptide 1 | |
| 206662_at | 2745 | glutaredoxin (thioltransferase) | electron transport |
| 205042_at | 10020 | UDP-N-acetylglucosamine-2- | energy pathways |
| | | epimerase/N-acetylmannosamine kinase | |
| 203923_s_at | 1536 | cytochrome b-245, beta polypeptide | energy pathways |
| | | (chronic granulomatous disease) | |
| 204044_at | 23475 | quinolinate phosphoribosyltransferase | energy pathways |
| | | (nicotinate-nucleotide pyrophosphorylase | |
| | | (carboxylating)) | |
| 202912_at | 133 | adrenomedullin | hormone metabolism |
| 205042_at | 10020 | UDP-N-acetylglucosamine-2- | lipid metabolism |
| | | epimerase/N-acetylmannosamine kinase | |
| 210942_s_at | 10402 | alpha2,3-sialyltransferase | lipid metabolism |
| 204446_s_at | 240 | arachidonate 5-lipoxygenase | lipid metabolism |
| 204174_at | 241 | arachidonate 5-lipoxygenase-activating | lipid metabolism |
| | | protein | |
| 202912_at | 133 | adrenomedullin | lipid metabolism |
| 201963_at | 2180 | fatty-acid-Coenzyme A ligase, long-chain 2 | lipid metabolism |
| 208771_s_at | 4048 | leukotriene A4 hydrolase | lipid metabolism |
| 207275_s_at | 2179 | fatty-acid-Coenzyme A ligase, long-chain 1 | lipid metabolism |
| 1053_at | 5982 | replication factor C (activator 1) 2, 40 kDa | nucleobase, nucleoside, |
| | | | nucleotide and nucleic acid |
| | | | metabolism |
| 205042_at | 10020 | UDP-N-acetylglucosamine-2- | nucleobase, nucleoside, |
| | | epimerase/N-acetylmannosamine kinase | nucleotide and nucleic acid |
| | | | metabolism |
| 218258_at | 51082 | polymerase (RNA) I polypeptide D, | nucleobase, nucleoside, |
| | | 16 kDa | nucleotide and nucleic acid |
| | | | metabolism |
| 205053_at | 5557 | primase, polypeptide 1, 49 kDa | nucleobase, nucleoside, |
| | | | nucleotide and nucleic acid |
| | | | metabolism |
| 203409_at | 1643 | damage-specific DNA binding protein 2, | nucleobase, nucleoside, |
| | | 48 kDa | nucleotide and nucleic acid |
| | | | metabolism |
| 214727_at | 675 | breast cancer 2, early onset | nucleobase, nucleoside, |
| | | | nucleotide and nucleic acid |
| | | | metabolism |
| 209773_s_at | 6241 | ribonucleotide reductase M2 polypeptide | nucleobase, nucleoside, |
| | | | nucleotide and nucleic acid |
| | | | metabolism |
| 202678_at | 2958 | general transcription factor IIA, 2, 12 kDa | nucleobase, nucleoside, |
| | | | nucleotide and nucleic acid |
| | | | metabolism |
| 201710_at | 4605 | v-myb myeloblastosis viral oncogene | nucleobase, nucleoside, |
| | | homolog (avian)-like 2 | nucleotide and nucleic acid |
| | | | metabolism |
| 202912_at | 133 | adrenomedullin | nucleobase, nucleoside, |
| | | | nucleotide and nucleic acid |
| | | | metabolism |
| 200660_at | 6282 | S100 calcium binding protein A11 | nucleobase, nucleoside, |
| | | (calgizzarin) | nucleotide and nucleic acid |
| | | | metabolism |
| 209930_s_at | 4778 | nuclear factor (erythroid-derived 2), | nucleobase, nucleoside, |
| | | 45 kDa | nucleotide and nucleic acid |
| | | | metabolism |
| 201989_s_at | 1389 | cAMP responsive element binding | nucleobase, nucleoside, |
| | | protein-like 2 | nucleotide and nucleic acid |
| | | | metabolism |
| 205042_at | 10020 | UDP-N-acetylglucosamine-2- | organic acid metabolism |
| | | epimerase/N-acetylmannosamine kinase | |
| 204446_s_at | 240 | arachidonate 5-lipoxygenase | organic acid metabolism |
| 204174_at | 241 | arachidonate 5-lipoxygenase-activating | organic acid metabolism |
| | | protein | |
| 201963_at | 2180 | fatty-acid-Coenzyme A ligase, long-chain 2 | organic acid metabolism |
| 208771_s_at | 4048 | leukotriene A4 hydrolase | organic acid metabolism |
| 207275_s_at | 2179 | fatty-acid-Coenzyme A ligase, long-chain 1 | organic acid metabolism |
| 206734_at | 8690 | jerky homolog-like (mouse) | organogenesis |
| 211506_s_at | 3576 | interleukin 8 | organogenesis |
| 205807_s_at | 7286 | tuftelin 1 | organogenesis |
| 218224_at | 9240 | paraneoplastic antigen MA1 | organogenesis |
| 202437_s_at | 1545 | cytochrome P450, family 1, subfamily B, | organogenesis |
| | | polypeptide 1 | |
| 205807_s_at | 7286 | tuftelin 1 | ossification |
| 202437_s_at | 1545 | cytochrome P450, family 1, subfamily B, | perception of external stimulus |
| | | polypeptide 1 | |
| 202933_s_at | 7525 | v-yes-1 Yamaguchi sarcoma viral | phosphorus metabolism |
| | | oncogene homolog 1 | |
| 209457_at | 1847 | dual specificity phosphatase 5 | phosphorus metabolism |
| 209585_s_at | 9562 | multiple inositol polyphosphate histidine | phosphorus metabolism |
| | | phosphatase, 1 | |
| 214727_at | 675 | breast cancer 2, early onset | programmed cell death |
| 201710_at | 4605 | v-myb myeloblastosis viral oncogene | programmed cell death |
| | | homolog (avian)-like 2 | |
| 204614_at | 5055 | serine (or cysteine) proteinase inhibitor, | programmed cell death |
| | | clade B (ovalbumin), member 2 | |
| 205042_at | 10020 | UDP-N-acetylglucosamine-2- | protein metabolism |
| | | epimerase/N-acetylmannosamine kinase | |
| 202933_s_at | 7525 | v-yes-1 Yamaguchi sarcoma viral | protein metabolism |
| | | oncogene homolog 1 | |
| 209457_at | 1847 | dual specificity phosphatase 5 | protein metabolism |
| 210942_s_at | 10402 | alpha2,3-sialyltransferase | protein metabolism |
| 219649_at | 29929 | dolichyl-P-Glc:Man9GlcNAc2-PP- | protein metabolism |
| | | dolichylglucosyltransferase | |
| 200962_at | 6160 | ribosomal protein L31 | protein metabolism |
| 216250_s_at | 9404 | leupaxin | protein metabolism |
| 208771_s_at | 4048 | leukotriene A4 hydrolase | protein metabolism |
| 212190_at | 5270 | serine (or cysteine) proteinase inhibitor, | protein metabolism |
| | | clade E (nexin, plasminogen activator | |
| | | inhibitor type 1), member 2 | |
| 218875_s_at | 26271 | F-box only protein 5 | protein metabolism |
| 212190_at | 5270 | serine (or cysteine) proteinase inhibitor, | regulation of metabolism |
| | | clade E (nexin, plasminogen activator | |
| | | inhibitor type 1), member 2 | |
| 205557_at | 671 | bactericidal/permeability-increasing | response to abiotic stimulus |
| | | protein | |
| 202437_s_at | 1545 | cytochrome P450, family 1, subfamily B, | response to abiotic stimulus |
| | | polypeptide 1 | |
| 211506_s_at | 3576 | interleukin 8 | response to biotic stimulus |
| 205557_at | 671 | bactericidal/permeability-increasing | response to biotic stimulus |
| | | protein | |
| 203923_s_at | 1536 | cytochrome b-245, beta polypeptide | response to biotic stimulus |
| | | (chronic granulomatous disease) | |
| 204446_s_at | 240 | arachidonate 5-lipoxygenase | response to biotic stimulus |
| 204174_at | 241 | arachidonate 5-lipoxygenase-activating | response to biotic stimulus |
| | | protein | |
| 202912_at | 133 | adrenomedullin | response to biotic stimulus |
| 201641_at | 684 | bone marrow stromal cell antigen 2 | response to biotic stimulus |
| 208771_s_at | 4048 | leukotriene A4 hydrolase | response to biotic stimulus |
| 209575_at | 3588 | interleukin 10 receptor, beta | response to biotic stimulus |
| 216950_s_at | 2209 | Fc fragment of IgG, high affinity Ia, | response to biotic stimulus |
| | | receptor for (CD64) | |
| 211506_s_at | 3576 | interleukin 8 | response to |
| | | | pest/pathogen/parasite |
| 203923_s_at | 1536 | cytochrome b-245, beta polypeptide | response to |
| | | (chronic granulomatous disease) | pest/pathogen/parasite |
| 204446_s_at | 240 | arachidonate 5-lipoxygenase | response to |
| | | | pest/pathogen/parasite |
| 204174_at | 241 | arachidonate 5-lipoxygenase-activating | response to |
| | | protein | pest/pathogen/parasite |
| 201641_at | 684 | bone marrow stromal cell antigen 2 | response to |
| | | | pest/pathogen/parasite |
| 208771_s_at | 4048 | leukotriene A4 hydrolase | response to |
| | | | pest/pathogen/parasite |
| 209575_at | 3588 | interleukin 10 receptor, beta | response to |
| | | | pest/pathogen/parasite |
| 211506_s_at | 3576 | interleukin 8 | response to wounding |
| 203923_s_at | 1536 | cytochrome b-245, beta polypeptide | response to wounding |
| | | (chronic granulomatous disease) | |
| 204446_s_at | 240 | arachidonate 5-lipoxygenase | response to wounding |
| 204174_at | 241 | arachidonate 5-lipoxygenase-activating | response to wounding |
| | | protein | |
| 202912_at | 133 | adrenomedullin | response to wounding |
| 208771_s_at | 4048 | leukotriene A4 hydrolase | response to wounding |
| 209575_at | 3588 | interleukin 10 receptor, beta | response to wounding |
| 218224_at | 9240 | paraneoplastic antigen MA1 | sexual reproduction |
| 202933_s_at | 7525 | v-yes-1 Yamaguchi sarcoma viral oncogene | signal transduction |
| | | homolog 1 | |
| 211506_s_at | 3576 | interleukin 8 | signal transduction |
| 202912_at | 133 | adrenomedullin | signal transduction |
| 203336_s_at | 9270 | integrin cytoplasmic domain-associated | signal transduction |
| | | protein 1 | |
| 216250_s_at | 9404 | leupaxin | signal transduction |
| 209154_at | 30851 | Tax interaction protein 1 | signal transduction |
| 209575_at | 3588 | interleukin 10 receptor, beta | signal transduction |
| 216950_s_at | 2209 | Fc fragment of IgG, high affinity Ia, receptor | signal transduction |
| | | for (CD64) | |
| 201989_s_at | 1389 | cAMP responsive element binding protein-like 2 | signal transduction |

### Programmed Cell Death

| | LOCUS | | |
|---|---|---|---|
| AFFX_ID | LINK | GENE NAME | CLASSIFICATION |
| 205042_at | 10020 | UDP-N-acetylglucosamine-2- | alcohol metabolism |
| | | epimerase/N-acetylmannosamine kinase | |
| 201612_at | 223 | aldehyde dehydrogenase 9 family, | aldehyde metabolism |
| | | member A1 | |
| 205042_at | 10020 | UDP-N-acetylglucosamine-2- | amine metabolism |
| | | epimerase/N-acetylmannosamine kinase | |
| 210942_s_at | 10402 | alpha2,3-sialyltransferase | amine metabolism |
| 205042_at | 10020 | UDP-N-acetylglucosamine-2- | biosynthesis |
| | | epimerase/N-acetylmannosamine kinase | |
| 210942_s_at | 10402 | alpha2,3-sialyltransferase | biosynthesis |
| 219649_at | 29929 | dolichyl-P-Glc:Man9GlcNAc2-PP- | biosynthesis |
| | | dolichylglucosyltransferase | |
| 200962_at | 6160 | ribosomal protein L31 | biosynthesis |
| 204446_s_at | 240 | arachidonate 5-lipoxygenase | biosynthesis |
| 204174_at | 241 | arachidonate 5-lipoxygenase-activating | biosynthesis |
| | | protein | |
| 202912_at | 133 | adrenomedullin | biosynthesis |
| 204044_at | 23475 | quinolinate phosphoribosyltransferase | biosynthesis |
| | | (nicotinate-nucleotide pyrophosphorylase | |
| | | (carboxylating)) | |
| 208771_s_at | 4048 | leukotriene A4 hydrolase | biosynthesis |
| 205042_at | 10020 | UDP-N-acetylglucosamine-2- | carbohydrate metabolism |
| | | epimerase/N-acetylmannosamine kinase | |
| 210942_s_at | 10402 | alpha2,3-sialyltransferase | carbohydrate metabolism |
| 202499_s_at | 6515 | solute carrier family 2 (facilitated glucose | carbohydrate metabolism |
| | | transporter), member 3 | |
| 205042_at | 10020 | UDP-N-acetylglucosamine-2- | catabolism |
| | | epimerase/N-acetylmannosamine kinase | |
| 208771_s_at | 4048 | leukotriene A4 hydrolase | catabolism |
| 212190_at | 5270 | serine (or cysteine) proteinase inhibitor, | catabolism |
| | | clade E (nexin, plasminogen activator | |
| | | inhibitor type 1), member 2 | |
| 218875_s_at | 26271 | F-box only protein 5 | catabolism |
| 205042_at | 10020 | UDP-N-acetylglucosamine-2- | cell adhesion |
| | | epimerase/N-acetylmannosamine kinase | |
| 211506_s_at | 3576 | interleukin 8 | cell adhesion |
| 203336_s_at | 9270 | integrin cytoplasmic domain-associated | cell adhesion |
| | | protein 1 | |
| 216250_s_at | 9404 | leupaxin | cell adhesion |
| 219890_at | 23601 | C-type (calcium dependent, carbohydrate- | cell adhesion |
| | | recognition domain) lectin, superfamily | |
| | | member 5 | |
| 214727_at | 675 | breast cancer 2, early onset | cell death |
| 201710_at | 4605 | v-myb myeloblastosis viral oncogene | cell death |
| | | homolog (avian)-like 2 | |
| 204614_at | 5055 | serine (or cysteine) proteinase inhibitor, | cell death |
| | | clade B (ovalbumin), member 2 | |
| 212190_at | 5270 | serine (or cysteine) proteinase inhibitor, | cell migration |
| | | clade E (nexin, plasminogen activator | |
| | | inhibitor type 1), member 2 | |
| 214727_at | 675 | breast cancer 2, early onset | cell organization and biogenesis |
| 201714_at | 7283 | tubulin, gamma 1 | cell organization and biogenesis |
| 201999_s_at | 6993 | t-complex-associated-testis-expressed 1- | cell organization and biogenesis |
| | | like 1 | |
| 1053_at | 5982 | replication factor C (activator 1) 2, 40 kDa | cell proliferation |
| 205053_at | 5557 | primase, polypeptide 1, 49 kDa | cell proliferation |
| 214727_at | 675 | breast cancer 2, early onset | cell proliferation |
| 209773_s_at | 6241 | ribonucleotide reductase M2 polypeptide | cell proliferation |
| 211506_s_at | 3576 | interleukin 8 | cell proliferation |
| 201710_at | 4605 | v-myb myeloblastosis viral oncogene | cell proliferation |
| | | homolog (avian)-like 2 | |
| 200660_at | 6282 | S100 calcium binding protein A11 | cell proliferation |
| | | (calgizzarin) | |
| 201641_at | 684 | bone marrow stromal cell antigen 2 | cell proliferation |
| 211506_s_at | 3576 | interleukin 8 | cell-cell signaling |
| 202912_at | 133 | adrenomedullin | cell-cell signaling |
| 201641_at | 684 | bone marrow stromal cell antigen 2 | cell-cell signaling |
| 204044_at | 23475 | quinolinate phosphoribosyltransferase | cell-cell signaling |
| | | (nicotinate-nucleotide pyrophosphorylase | |
| | | (carboxylating)) | |
| 204044_at | 23475 | quinolinate phosphoribosyltransferase | coenzymes and prosthetic |
| | | (nicotinate-nucleotide pyrophosphorylase | group metabolism |
| | | (carboxylating)) | |
| 203923_s_at | 1536 | cytochrome b-245, beta polypeptide | electron transport |
| | | (chronic granulomatous disease) | |
| 204446_s_at | 240 | arachidonate 5-lipoxygenase | electron transport |
| 202437_s_at | 1545 | cytochrome P450, family 1, subfamily B, | electron transport |
| | | polypeptide 1 | |
| 206662_at | 2745 | glutaredoxin (thioltransferase) | electron transport |
| 205042_at | 10020 | UDP-N-acetylglucosamine-2- | energy pathways |
| | | epimerase/N-acetylmannosamine kinase | |
| 203923_s_at | 1536 | cytochrome b-245, beta polypeptide | energy pathways |
| | | (chronic granulomatous disease) | |
| 204044_at | 23475 | quinolinate phosphoribosyltransferase | energy pathways |
| | | (nicotinate-nucleotide pyrophosphorylase | |
| | | (carboxylating)) | |
| 202912_at | 133 | adrenomedullin | hormone metabolism |
| 205042_at | 10020 | UDP-N-acetylglucosamine-2- | lipid metabolism |
| | | epimerase/N-acetylmannosamine kinase | |
| 210942_s_at | 10402 | alpha2,3-sialyltransferase | lipid metabolism |
| 204446_s_at | 240 | arachidonate 5-lipoxygenase | lipid metabolism |
| 204174_at | 241 | arachidonate 5-lipoxygenase-activating | lipid metabolism |
| | | protein | |
| 202912_at | 133 | adrenomedullin | lipid metabolism |
| 201963_at | 2180 | fatty-acid-Coenzyme A ligase, long-chain 2 | lipid metabolism |
| 208771_s_at | 4048 | leukotriene A4 hydrolase | lipid metabolism |
| 207275_s_at | 2179 | fatty-acid-Coenzyme A ligase, long-chain 1 | lipid metabolism |
| 1053_at | 5982 | replication factor C (activator 1) 2, 40 kDa | nucleobase, nucleoside, |
| | | | nucleotide and nucleic acid |
| | | | metabolism |
| 205042_at | 10020 | UDP-N-acetylglucosamine-2- | nucleobase, nucleoside, |
| | | epimerase/N-acetylmannosamine kinase | nucleotide and nucleic acid |
| | | | metabolism |
| 218258_at | 51082 | polymerase (RNA) I polypeptide D, 16 kDa | nucleobase, nucleoside, |
| | | | nucleotide and nucleic acid |
| | | | metabolism |
| 205053_at | 5557 | primase, polypeptide 1, 49 kDa | nucleobase, nucleoside, |
| | | | nucleotide and nucleic acid |
| | | | metabolism |
| 203409_at | 1643 | damage-specific DNA binding protein 2, | nucleobase, nucleoside, |
| | | 48 kDa | nucleotide and nucleic acid |
| | | | metabolism |
| 214727_at | 675 | breast cancer 2, early onset | nucleobase, nucleoside, |
| | | | nucleotide and nucleic acid |
| | | | metabolism |
| 209773_s_at | 6241 | ribonucleotide reductase M2 polypeptide | nucleobase, nucleoside, |
| | | | nucleotide and nucleic acid |
| | | | metabolism |
| 202678_at | 2958 | general transcription factor IIA, 2, 12 kDa | nucleobase, nucleoside, |
| | | | nucleotide and nucleic acid |
| | | | metabolism |
| 201710_at | 4605 | v-myb myeloblastosis viral oncogene | nucleobase, nucleoside, |
| | | homolog (avian)-like 2 | nucleotide and nucleic acid |
| | | | metabolism |
| 202912_at | 133 | adrenomedullin | nucleobase, nucleoside, |
| | | | nucleotide and nucleic acid |
| | | | metabolism |
| 200660_at | 6282 | S100 calcium binding protein A11 | nucleobase, nucleoside, |
| | | (calgizzarin) | nucleotide and nucleic acid |
| | | | metabolism |
| 209930_s_at | 4778 | nuclear factor (erythroid-derived 2), | nucleobase, nucleoside, |
| | | 45 kDa | nucleotide and nucleic acid |
| | | | metabolism |
| 201989_s_at | 1389 | cAMP responsive element binding | nucleobase, nucleoside, |
| | | protein-like 2 | nucleotide and nucleic acid |
| | | | metabolism |
| 205042_at | 10020 | UDP-N-acetylglucosamine-2- | organic acid metabolism |
| | | epimerase/N-acetylmannosamine kinase | |
| 204446_s_at | 240 | arachidonate 5-lipoxygenase | organic acid metabolism |
| 204174_at | 241 | arachidonate 5-lipoxygenase-activating | organic acid metabolism |
| | | protein | |
| 201963_at | 2180 | fatty-acid-Coenzyme A ligase, long-chain 2 | organic acid metabolism |
| 208771_s_at | 4048 | leukotriene A4 hydrolase | organic acid metabolism |
| 207275_s_at | 2179 | fatty-acid-Coenzyme A ligase, long-chain 1 | organic acid metabolism |
| 206734_at | 8690 | jerky homolog-like (mouse) | organogenesis |
| 211506_s_at | 3576 | interleukin 8 | organogenesis |
| 205807_s_at | 7286 | tuftelin 1 | organogenesis |
| 218224_at | 9240 | paraneoplastic antigen MA1 | organogenesis |
| 202437_s_at | 1545 | cytochrome P450, family 1, subfamily B, | organogenesis |
| | | polypeptide 1 | |
| 205807_s_at | 7286 | tuftelin 1 | ossification |
| 202437_s_at | 1545 | cytochrome P450, family 1, subfamily B, | perception of external stimulus |
| | | polypeptide 1 | |
| 202933_s_at | 7525 | v-yes-1 Yamaguchi sarcoma viral | phosphorus metabolism |
| | | oncogene homolog 1 | |
| 209457_at | 1847 | dual specificity phosphatase 5 | phosphorus metabolism |
| 209585_s_at | 9562 | multiple inositol polyphosphate histidine | phosphorus metabolism |
| | | phosphatase, 1 | |
| 214727_at | 675 | breast cancer 2, early onset | programmed cell death |
| 201710_at | 4605 | v-myb myeloblastosis viral oncogene homolog | programmed cell death |
| | | (avian)-like 2 | |
| 204614_at | 5055 | serine (or cysteine) proteinase inhibitor, clade | programmed cell death |
| | | B (ovalbumin), member 2 | |

### Pathogen Response

| | LOCUS | | |
|---|---|---|---|
| AFFX_ID | LINK | GENE NAME | CLASSIFICATION |
| 205042_at | 10020 | UDP-N-acetylglucosamine-2- | alcohol metabolism |
| | | epimerase/N-acetylmannosamine kinase | |
| 201612_at | 223 | aldehyde dehydrogenase 9 family, | aldehyde metabolism |
| | | member A1 | |
| 205042_at | 10020 | UDP-N-acetylglucosamine-2- | amine metabolism |
| | | epimerase/N-acetylmannosamine kinase | |
| 210942_s_at | 10402 | alpha2,3-sialyltransferase | amine metabolism |
| 205042_at | 10020 | UDP-N-acetylglucosamine-2- | biosynthesis |
| | | epimerase/N-acetylmannosamine kinase | |
| 210942_s_at | 10402 | alpha2,3-sialyltransferase | biosynthesis |
| 219649_at | 29929 | dolichyl-P-Glc:Man9GlcNAc2-PP- | biosynthesis |
| | | dolichylglucosyltransferase | |
| 200962_at | 6160 | ribosomal protein L31 | biosynthesis |
| 204446_s_at | 240 | arachidonate 5-lipoxygenase | biosynthesis |
| 204174_at | 241 | arachidonate 5-lipoxygenase-activating | biosynthesis |
| | | protein | |
| 202912_at | 133 | adrenomedullin | biosynthesis |
| 204044_at | 23475 | quinolinate phosphoribosyltransferase | biosynthesis |
| | | (nicotinate-nucleotide pyrophosphorylase | |
| | | (carboxylating)) | |
| 208771_s_at | 4048 | leukotriene A4 hydrolase | biosynthesis |
| 205042_at | 10020 | UDP-N-acetylglucosamine-2- | carbohydrate metabolism |
| | | epimerase/N-acetylmannosamine kinase | |
| 210942_s_at | 10402 | alpha2,3-sialyltransferase | carbohydrate metabolism |
| 202499_s_at | 6515 | solute carrier family 2 (facilitated glucose | carbohydrate metabolism |
| | | transporter), member 3 | |
| 205042_at | 10020 | UDP-N-acetylglucosamine-2- | catabolism |
| | | epimerase/N-acetylmannosamine kinase | |
| 208771_s_at | 4048 | leukotriene A4 hydrolase | catabolism |
| 212190_at | 5270 | serine (or cysteine) proteinase inhibitor, | catabolism |
| | | clade E (nexin, plasminogen activator | |
| | | inhibitor type 1), member 2 | |
| 218875_s_at | 26271 | F-box only protein 5 | catabolism |
| 205042_at | 10020 | UDP-N-acetylglucosamine-2- | cell adhesion |
| | | epimerase/N-acetylmannosamine kinase | |
| 211506_s_at | 3576 | interleukin 8 | cell adhesion |
| 203336_s_at | 9270 | integrin cytoplasmic domain-associated | cell adhesion |
| | | protein 1 | |
| 216250_s_at | 9404 | leupaxin | cell adhesion |
| 219890_at | 23601 | C-type (calcium dependent, | cell adhesion |
| | | carbohydrate-recognition domain) lectin, | |
| | | superfamily member 5 | |
| 214727_at | 675 | breast cancer 2, early onset | cell death |
| 201710_at | 4605 | v-myb myeloblastosis viral oncogene | cell death |
| | | homolog (avian)-like 2 | |
| 204614_at | 5055 | serine (or cysteine) proteinase inhibitor, | cell death |
| | | clade B (ovalbumin), member 2 | |
| 212190_at | 5270 | serine (or cysteine) proteinase inhibitor, | cell migration |
| | | clade E (nexin, plasminogen activator | |
| | | inhibitor type 1), member 2 | |
| 214727_at | 675 | breast cancer 2, early onset | cell organization and biogenesis |
| 201714_at | 7283 | tubulin, gamma 1 | cell organization and biogenesis |
| 201999_s_at | 6993 | t-complex-associated-testis-expressed 1- | cell organization and biogenesis |
| | | like 1 | |
| 1053_at | 5982 | replication factor C (activator 1) 2, 40 kDa | cell proliferation |
| 205053_at | 5557 | primase, polypeptide 1, 49 kDa | cell proliferation |
| 214727_at | 675 | breast cancer 2, early onset | cell proliferation |
| 209773_s_at | 6241 | ribonucleotide reductase M2 polypeptide | cell proliferation |
| 211506_s_at | 3576 | interleukin 8 | cell proliferation |
| 201710_at | 4605 | v-myb myeloblastosis viral oncogene | cell proliferation |
| | | homolog (avian)-like 2 | |
| 200660_at | 6282 | S100 calcium binding protein A11 | cell proliferation |
| | | (calgizzarin) | |
| 201641_at | 684 | bone marrow stromal cell antigen 2 | cell proliferation |
| 211506_s_at | 3576 | interleukin 8 | cell-cell signaling |
| 202912_at | 133 | adrenomedullin | cell-cell signaling |
| 201641_at | 684 | bone marrow stromal cell antigen 2 | cell-cell signaling |
| 204044_at | 23475 | quinolinate phosphoribosyltransferase | cell-cell signaling |
| | | (nicotinate-nucleotide pyrophosphorylase | |
| | | (carboxylating)) | |
| 204044_at | 23475 | quinolinate phosphoribosyltransferase | coenzymes and prosthetic |
| | | (nicotinate-nucleotide pyrophosphorylase | group metabolism |
| | | (carboxylating)) | |
| 203923_s_at | 1536 | cytochrome b-245, beta polypeptide | electron transport |
| | | (chronic granulomatous disease) | |
| 204446_s_a | 240 | arachidonate 5-lipoxygenase | electron transport |
| 202437_s_at | 1545 | cytochrome P450, family 1, subfamily B, | electron transport |
| | | polypeptide 1 | |
| 206662_at | 2745 | glutaredoxin (thioltransferase) | electron transport |
| 205042_at | 10020 | UDP-N-acetylglucosamine-2- | energy pathways |
| | | epimerase/N-acetylmannosamine kinase | |
| 203923_s_at | 1536 | cytochrome b-245, beta polypeptide | energy pathways |
| | | (chronic granulomatous disease) | |
| 204044_at | 23475 | quinolinate phosphoribosyltransferase | energy pathways |
| | | (nicotinate-nucleotide pyrophosphorylase | |
| | | (carboxylating)) | |
| 202912_at | 133 | adrenomedullin | hormone metabolism |
| 205042_at | 10020 | UDP-N-acetylglucosamine-2- | lipid metabolism |
| | | epimerase/N-acetylmannosamine kinase | |
| 210942_s_at | 10402 | alpha2,3-sialyltransferase | lipid metabolism |
| 204446_s_at | 240 | arachidonate 5-lipoxygenase | lipid metabolism |
| 204174_at | 241 | arachidonate 5-lipoxygenase-activating | lipid metabolism |
| | | protein | |
| 202912_at | 133 | adrenomedullin | lipid metabolism |
| 201963_at | 2180 | fatty-acid-Coenzyme A ligase, long-chain 2 | lipid metabolism |
| 208771_s_at | 4048 | leukotriene A4 hydrolase | lipid metabolism |
| 207275_s_at | 2179 | fatty-acid-Coenzyme A ligase, long-chain 1 | lipid metabolism |
| 1053_at | 5982 | replication factor C (activator 1) 2, 40 kDa | nucleobase, nucleoside, |
| | | | nucleotide and nucleic acid |
| | | | metabolism |
| 205042_at | 10020 | UDP-N-acetylglucosamine-2- | nucleobase, nucleoside, |
| | | epimerase/N-acetylmannosamine kinase | nucleotide and nucleic acid |
| | | | metabolism |
| 218258_at | 51082 | polymerase (RNA) I polypeptide D, | nucleobase, nucleoside, |
| | | 16 kDa | nucleotide and nucleic acid |
| | | | metabolism |
| 205053_at | 5557 | primase, polypeptide 1, 49 kDa | nucleobase, nucleoside,. |
| | | | nucleotide and nucleic acid |
| | | | metabolism |
| 203409_at | 1643 | damage-specific DNA binding protein 2, | nucleobase, nucleoside, |
| | | 48 kDa | nucleotide and nucleic acid |
| | | | metabolism |
| 214727_at | 675 | breast cancer 2, early onset | nucleobase, nucleoside, |
| | | | nucleotide and nucleic acid |
| | | | metabolism |
| 209773_s_at | 6241 | ribonucleotide reductase M2 polypeptide | nucleobase, nucleoside,. |
| | | | nucleotide and nucleic acid |
| | | | metabolism |
| 202678_at | 2958 | general transcription factor IIA, 2, 12 kDa | nucleobase, nucleoside, |
| | | | nucleotide and nucleic acid |
| | | | metabolism |
| 201710_at | 4605 | v-myb myeloblastosis viral oncogene | nucleobase, nucleoside, |
| | | homolog (avian)-like 2 | nucleotide and nucleic acid |
| | | | metabolism |
| 202912_at | 133 | adrenomedullin | nucleobase, nucleoside, |
| | | | nucleotide and nucleic acid |
| | | | metabolism |
| 200660_at | 6282 | S100 calcium binding protein A11 | nucleobase, nucleoside, |
| | | (calgizzarin) | nucleotide and nucleic acid |
| | | | metabolism |
| 209930_s_at | 4778 | nuclear factor (erythroid-derived 2), | nucleobase, nucleoside,. |
| | | 45 kDa | nucleotide and nucleic acid |
| | | | metabolism |
| 201989_s_at | 1389 | cAMP responsive element binding | nucleobase, nucleoside, |
| | | protein-like 2 | nucleotide and nucleic acid |
| | | | metabolism |
| 205042_at | 10020 | UDP-N-acetylglucosamine-2- | organic acid metabolism |
| | | epimerase/N-acetylmannosamine kinase | |
| 204446_s_at | 240 | arachidonate 5-lipoxygenase | organic acid metabolism |
| 204174_at | 241 | arachidonate 5-lipoxygenase-activating | organic acid metabolism |
| | | protein | |
| 201963_at | 2180 | fatty-acid-Coenzyme A ligase, long-chain 2 | organic acid metabolism |
| 208771_s_at | 4048 | leukotriene A4 hydrolase | organic acid metabolism |
| 207275_s_at | 2179 | fatty-acid-Coenzyme A ligase, long-chain 1 | organic acid metabolism |
| 206734_at | 8690 | jerky homolog-like (mouse) | organogenesis |
| 211506_s_at | 3576 | interleukin 8 | organogenesis |
| 205807_s_at | 7286 | tuftelin 1 | organogenesis |
| 218224_at | 9240 | paraneoplastic antigen MA1 | organogenesis |
| 202437_s_at | 1545 | cytochrome P450, family 1, subfamily B, | organogenesis |
| | | polypeptide 1 | |
| 205807_s_at | 7286 | tuftelin 1 | ossification |
| 202437_s_at | 1545 | cytochrome P450, family 1, subfamily B, | perception of external stimulus |
| | | polypeptide 1 | |
| 202933_s_at | 7525 | v-yes-1 Yamaguchi sarcoma viral | phosphorus metabolism |
| | | oncogene homolog 1 | |
| 209457_at | 1847 | dual specificity phosphatase 5 | phosphorus metabolism |
| 209585_s_at | 9562 | multiple inositol polyphosphate histidine | phosphorus metabolism |
| | | phosphatase, 1 | |
| 214727_at | 675 | breast cancer 2, early onset | programmed cell death |
| 201710_at | 4605 | v-myb myeloblastosis viral oncogene | programmed cell death |
| | | homolog (avian)-like 2 | |
| 204614_at | 5055 | serine (or cysteine) proteinase inhibitor, | programmed cell death |
| | | clade B (ovalbumin), member 2 | |
| 205042_at | 10020 | UDP-N-acetylglucosamine-2- | protein metabolism |
| | | epimerase/N-acetylmannosamine kinase | |
| 202933_s_at | 7525 | v-yes-1 Yamaguchi sarcoma viral | protein metabolism |
| | | oncogene homolog 1 | |
| 209457_at | 1847 | dual specificity phosphatase 5 | protein metabolism |
| 210942_s_at | 10402 | alpha2,3-sialyltransferase | protein metabolism |
| 219649_at | 29929 | dolichyl-P-Glc:Man9GlcNAc2-PP- | protein metabolism |
| | | dolichylglucosyltransferase | |
| 200962_at | 6160 | ribosomal protein L31 | protein metabolism |
| 216250_s_at | 9404 | leupaxin | protein metabolism |
| 208771_s_at | 4048 | leukotriene A4 hydrolase | protein metabolism |
| 212190_at | 5270 | serine (or cysteine) proteinase inhibitor, | protein metabolism |
| | | clade E (nexin, plasminogen activator | |
| | | inhibitor type 1), member 2 | |
| 218875_s_at | 26271 | F-box only protein 5 | protein metabolism |
| 212190_at | 5270 | serine (or cysteine) proteinase inhibitor, | regulation of metabolism |
| | | clade E (nexin, plasminogen activator | |
| | | inhibitor type 1), member 2 | |
| 205557_at | 671 | bactericidal/permeability-increasing | response to abiotic stimulus |
| | | protein | |
| 202437_s_at | 1545 | cytochrome P450, family 1, subfamily B, | response to abiotic stimulus |
| | | polypeptide 1 | |
| 211506_s_at | 3576 | interleukin 8 | response to biotic stimulus |
| 205557_at | 671 | bactericidal/permeability-increasing | response to biotic stimulus |
| | | protein | |
| 203923_s_at | 1536 | cytochrome b-245, beta polypeptide | response to biotic stimulus |
| | | (chronic granulomatous disease) | |
| 204446_s_at | 240 | arachidonate 5-lipoxygenase | response to biotic stimulus |
| 204174_at | 241 | arachidonate 5-lipoxygenase-activating | response to biotic stimulus |
| | | protein | |
| 202912_at | 133 | adrenomedullin | response to biotic stimulus |
| 201641_at | 684 | bone marrow stromal cell antigen 2 | response to biotic stimulus |
| 208771_s_at | 4048 | leukotriene A4 hydrolase | response to biotic stimulus |
| 209575_at | 3588 | interleukin 10 receptor, beta | response to biotic stimulus |
| 216950_s_at | 2209 | Fc fragment of IgG, high affinity Ia, | response to biotic stimulus |
| | | receptor for (CD64) | |
| 211506_s_at | 3576 | interleukin 8 | response to pest/pathogen/parasite |
| 203923_s_at | 1536 | cytochrome b-245, beta polypeptide (chronic | response to pest/pathogen/parasite |
| | | granulomatous disease) | |
| 204446_s_at | 240 | arachidonate 5-lipoxygenase | response to pest/pathogen/parasite |
| 204174_at | 241 | arachidonate 5-lipoxygenase-activating | response to pest/pathogen/parasite |
| | | protein | |
| 201641_at | 684 | bone marrow stromal cell antigen 2 | response to pest/pathogen/parasite |
| 208771_s_at | 4048 | leukotriene A4 hydrolase | response to pest/pathogen/parasite |
| 209575_at | 3588 | interleukin 10 receptor, beta | response to pest/pathogen/parasite |

VX-944 (Late) vs. MPA (Late): 335 genes were found to be common between these two comparisons. These genes were further assigned to the following functional categories:

| | NUMBER |
|---|---|
| | of Genes |
| Phosphatidylinositol signaling system | 15 |
| Cell cycle | 7 |
| Apoptosis | 6 |
| Inositol phosphatemetabolism | 4 |
| Integrin-mediated celladhesion | 4 |
| Arginine and proline metabolism | 3 |
| Fatty acid metabolism | 3 |
| Purine metabolism | 3 |
| Oxidative phosphorylation | 2 |
| Parkinson's disease | 2 |
| Prostaglandin andleukotriene metabolism | 2 |
| Pyrimidine metabolism | 2 |
| Pyruvate metabolism | 2 |
| Ribosome | 2 |
| Starch and sucrosemetabolism | 2 |
| Urea cycle and metabolism ofamino groups | 2 |
| Glycosylphosphatidylinositol(GPI)-anchor | 2 |
| biosynthesis | |
| ATP synthesis | 1 |
| Androgen and estrogen metabolism | 1 |
| Benzoate degradation viaCoA ligation | 1 |
| Carbon fixation | 1 |
| DNApolymerase | 1 |
| Glutathione metabolism | 1 |
| Glycerolipid metabolism | 1 |
| Glycolysis/Gluconeogenesis | 1 |
| Histidine metabolism | 1 |
| N-Glycandegradation | 1 |
| Nitrogen metabolism | 1 |
| Proteasome | 1 |
| Selenoamino acid metabolism | 1 |
| Sphingoglycolipidmetabolism | 1 |
| Sulfur metabolism | 1 |
| Transcription factors | 1 |
| Tryptophan metabolism | 1 |
| Ubiquinonebiosynthesis | 1 |
| gamma-Hexachlorocyclohexane degradation | 1 |
| unclassified | 277 |

### Phosphatidyl Inositol Signaling System:

| | LOCUS | | |
|---|---|---|---|
| AFFYID | LINK | GENE NAME | PATHWAY |
| 208745_at | 10632 | ATP synthase, H+ transporting, | ATP synthesis |
| | | mitochondrial F0 complex, subunit g | |
| 201413_at | 3295 | hydroxysteroid (17-beta) | Androgen and estrogen |
| | | dehydrogenase 4 | metabolism |
| 200797_s_at | 4170 | myeloid cell leukemia sequence 1 | Apoptosis |
| | | (BCL2-related) | |
| 201502_s_at | 4792 | nuclear factor of kappa light | Apoptosis |
| | | polypeptide gene enhancer in B-cells | |
| | | inhibitor, alpha | |
| 205681_at | 597 | BCL2-related protein A1 | Apoptosis |
| 207113_s_at | 7124 | tumor necrosis factor (TNF | Apoptosis |
| | | superfamily, member 2) | |
| 203508_at | 7133 | tumor necrosis factor receptor | Apoptosis |
| | | superfamily, member 1B | |
| 203984_s_at | 842 | caspase 9, apoptosis-related | Apoptosis |
| | | cysteine protease | |
| 200884_at | 1152 | creatine kinase, brain | Arginine and proline metabolism |
| 206177_s_at | 383 | arginase, liver | Arginine and proline metabolism |
| 203455_s_at | 6303 | spermidine/spermine N1- | Arginine and proline metabolism |
| | | acetyltransferase | |
| 205260_s_at | 97 | acylphosphatase 1, erythrocyte | Benzoate degradation viaCoA |
| | | (common) type | ligation |
| 204059_s_at | 4199 | malic enzyme 1, NADP(+)- | Carbon fixation |
| | | dependent, cytosolic | |
| 205899_at | 8900 | cyclin A1 | Cell cycle |
| 201700_at | 896 | cyclin D3 | Cell cycle |
| 205034_at | 9134 | cyclin E2 | Cell cycle |
| 38158_at | 9700 | extra spindle poles like 1 (S. cerevisiae) | Cell cycle |
| 204695_at | 993 | cell division cycle 25A | Cell cycle |
| 201853_s_at | 994 | cell division cycle 25B | Cell cycle |
| 205167_s_at | 995 | cell division cycle 25C | Cell cycle |
| 205053_at | 5557 | primase, polypeptide 1, 49 kDa | DNApolymerase |
| 202437_s_at | 1545 | cytochrome P450, family 1, | Fatty acid metabolism |
| | | subfamily B, polypeptide 1 | |
| 207275_s_at | 2179 | fatty-acid-Coenzyme A ligase, long- | Fatty acid metabolism |
| | | chain 1 | |
| 201963_at | 2180 | fatty-acid-Coenzyme A ligase, long- | Fatty acid metabolism |
| | | chain 2 | |
| 202554_s_at | 2947 | glutathione S-transferase M3 (brain) | Glutathione metabolism |
| 203385_at | 1606 | diacylglycerol kinase, alpha 80 kDa | Glycerolipid metabolism |
| 205260_s_at | 97 | acylphosphatase 1, erythrocyte | Glycolysis/Gluconeogenesis |
| | | (common) type | |
| 206643_at | 3034 | histidine ammonia-lyase | Histidine metabolism |
| 202794_at | 3628 | inositol polyphosphate-1- | Inositol phosphatemetabolism |
| | | phosphatase | |
| 204552_at | 3631 | inositol polyphosphate-4- | Inositol phosphatemetabolism |
| | | phosphatase, type I, 107 kDa | |
| 201598_s_at | 3636 | inositol polyphosphate phosphatase- | Inositol phosphatemetabolism |
| | | like 1 | |
| 212990_at | 8867 | synaptojanin 1 | Inositol phosphatemetabolism |
| 218807_at | 10451 | vav 3 oncogene | Integrin-mediated celladhesion |
| 207121_s_at | 5597 | mitogen-activated protein kinase 6 | Integrin-mediated celladhesion |
| 200931_s_at | 7414 | vinculin | Integrin-mediated celladhesion |
| 208683_at | 824 | calpain 2, (m/II) large subunit | Integrin-mediated celladhesion |
| 208926_at | 4758 | sialidase 1 (lysosomal sialidase) | N-Glycandegradation |
| 206643_at | 3034 | histidine ammonia-lyase | Nitrogen metabolism |
| 208745_at | 10632 | ATP synthase, H+ transporting, | Oxidative phosphorylation |
| | | mitochondrial F0 complex, subunit g | |
| 206790_s_at | 4707 | NADH dehydrogenase (ubiquinone) | Oxidative phosphorylation |
| | | 1 beta subcomplex, 1, 7 kDa | |
| 202530_at | 1432 | mitogen-activated protein kinase 14 | Parkinson's disease |
| 203984_s_at | 842 | caspase 9, apoptosis-related | Parkinson's disease |
| | | cysteine protease | |
| 204446_s_at | 240 | arachidonate 5-lipoxygenase | Prostaglandin andleukotriene |
| | | | metabolism |
| 208771_s_at | 4048 | leukotriene A4 hydrolase | Prostaglandin andleukotriene |
| | | | metabolism |
| 200882_s_at | 5710 | proteasome (prosome, macropain) | Proteasome |
| | | 26S subunit, non-ATPase, 4 | |
| 209773_s_at | 6241 | ribonucleotide reductase M2 | Purine metabolism |
| | | polypeptide | |
| 209043_at | 9061 | 3′-phosphoadenosine 5′- | Purine metabolism |
| | | phosphosulfate synthase 1 | |
| 209473_at | 953 | ectonucleoside triphosphate | Purine metabolism |
| | | diphosphohydrolase 1 | |
| 209773_s_at | 6241 | ribonucleotide reductase M2 | Pyrimidine metabolism |
| | | polypeptide | |
| 209473_at | 953 | ectonucleoside triphosphate | Pyrimidine metabolism |
| | | diphosphohydrolase 1 | |
| 204059_s_at | 4199 | malic enzyme 1, NADP(+)- | Pyruvate metabolism |
| | | dependent, cytosolic | |
| 205260_s_at | 97 | acylphosphatase 1, erythrocyte | Pyruvate metabolism |
| | | (common) type | |
| 221989_at | 6134 | ribosomal protein L10 | Ribosome |
| 200962_at | 6160 | ribosomal protein L31 | Ribosome |
| 209043_at | 9061 | 3′-phosphoadenosine 5′- | Selenoamino acidmetabolism |
| | | phosphosulfate synthase 1 | |
| 208926_at | 4758 | sialidase 1 (lysosomal sialidase) | Sphingoglycolipidmetabolism |
| 208498_s_at | 276 | amylase, alpha 1A; salivary | Starch and sucrosemetabolism |
| 202990_at | 5836 | phosphorylase, glycogen; liver (Hers | Starch and sucrosemetabolism |
| | | disease, glycogen storage disease | |
| | | type VI) | |
| 209043_at | 9061 | 3′-phosphoadenosine 5′- | Sulfur metabolism |
| | | phosphosulfate synthase 1 | |
| 210053_at | 6877 | TAF5 RNA polymerase II, TATA box | Transcription factors |
| | | binding protein (TBP)-associated | |
| | | factor, 100 kDa | |
| 202437_s_at | 1545 | cytochrome P450, family 1, | Tryptophan metabolism |
| | | subfamily B, polypeptide 1 | |
| 206790_s_at | 4707 | NADH dehydrogenase (ubiquinone) | Ubiquinonebiosynthesis |
| | | 1 beta subcomplex, 1, 7 kDa | |
| 200884_at | 1152 | creatine kinase, brain | Urea cycle and metabolism |
| | | | ofamino groups |
| 206177_s_at | 383 | arginase, liver | Urea cycle and metabolism |
| | | | ofamino groups |
| 205281_s_at | 5277 | phosphatidylinositol glycan, class A | Glycosylphosphatidylinositol(GPI)- |
| | | (paroxysmal nocturnal | anchor biosynthesis |
| | | hemoglobinuria) | |
| 205452_at | 9488 | phosphatidylinositol glycan, class B | Glycosylphosphatidylinositol(GPI)- |
| | | | anchor biosynthesis |
| 209714_s_at | 1033 | cyclin-dependent kinase inhibitor 3 | Phosphatidylinositol signaling |
| | | (CDK2-associated dual specificity | system |
| | | phosphatase) | |
| 221563_at | 11221 | dual specificity phosphatase 10 | Phosphatidylinositol signaling |
| | | | system |
| 203385_at | 1606 | diacylglycerol kinase, alpha 80 kDa | Phosphatidylinositol signaling |
| | | | system |
| 209457_at | 1847 | dual specificity phosphatase 5 | Phosphatidylinositol signaling |
| | | | system |
| 208892_s_at | 1848 | dual specificity phosphatase 6 | Phosphatidylinositol signaling |
| | | | system |
| 202794_at | 3628 | inositol polyphosphate-1- | Phosphatidylinositol signaling |
| | | phosphatase | system |
| 204552_at | 3631 | inositol polyphosphate-4- | Phosphatidylinositol signaling |
| | | phosphatase, type I, 107 kDa | system |
| 201598_s_at | 3636 | inositol polyphosphate phosphatase- | Phosphatidylinositol signaling |
| | | like 1 | system |
| 204852_s_at | 5778 | protein tyrosine phosphatase, non- | Phosphatidylinositol signaling |
| | | receptor type 7 | system |
| 202006_at | 5782 | protein tyrosine phosphatase, non- | Phosphatidylinositol signaling |
| | | receptor type 12 | system |
| 221840_at | 5791 | protein tyrosine phosphatase, | Phosphatidylinositol signaling |
| | | receptor type, E | system |
| 212990_at | 8867 | synaptojanin 1 | Phosphatidylinositol signaling |
| | | | system |
| 204695_at | 993 | cell division cycle 25A | Phosphatidylinositol signaling |
| | | | system |
| 201853_s_at | 994 | cell division cycle 25B | Phosphatidylinositol signaling |
| | | | system |
| 205167_s_at | 995 | cell division cycle 25C | Phosphatidylinositol signaling |
| | | | system |

### Cell Cycle

| | LOCUS | | |
|---|---|---|---|
| AFFYID | LINK | GENE NAME | PATHWAY |
| 208745_at | 10632 | ATP synthase, H+ transporting, | ATP synthesis |
| | | mitochondrial F0 complex, subunit g | |
| 201413_at | 3295 | hydroxysteroid (17-beta) | Androgen and estrogen |
| | | dehydrogenase 4 | metabolism |
| 200797_s_at | 4170 | myeloid cell leukemia sequence 1 | Apoptosis |
| | | (BCL2-related) | |
| 201502_s_at | 4792 | nuclear factor of kappa light | Apoptosis |
| | | polypeptide gene enhancer in B-cells | |
| | | inhibitor, alpha | |
| 205681_at | 597 | BCL2-related protein A1 | Apoptosis |
| 207113_s_at | 7124 | tumor necrosis factor (TNF | Apoptosis |
| | | superfamily, member 2) | |
| 203508_at | 7133 | tumor necrosis factor receptor | Apoptosis |
| | | superfamily, member 1B | |
| 203984_s_at | 842 | caspase 9, apoptosis-related | Apoptosis |
| | | cysteine protease | |
| 200884_at | 1152 | creatine kinase, brain | Arginine and proline metabolism |
| 206177_s_at | 383 | arginase, liver | Arginine and proline metabolism |
| 203455_s_at | 6303 | spermidine/spermine N1- | Arginine and proline metabolism |
| | | acetyltransferase | |
| 205260_s_at | 97 | acylphosphatase 1, erythrocyte | Benzoate degradation viaCoA |
| | | (common) type | ligation |
| 204059_s_at | 4199 | malic enzyme 1, NADP(+)- | Carbon fixation |
| | | dependent, cytosolic | |
| 205899_at | 8900 | cyclin A1 | Cell cycle |
| 201700_at | 896 | cyclin D3 | Cell cycle |
| 205034_at | 9134 | cyclin E2 | Cell cycle |
| 38158_at | 9700 | extra spindle poles like 1 (S. cerevisiae) | Cell cycle |
| 204695_at | 993 | cell division cycle 25A | Cell cycle |
| 201853_s_at | 994 | cell division cycle 25B | Cell cycle |
| 205167_s_at | 995 | cell division cycle 25C | Cell cycle |

### Apoptosis

| | LOCUS | | |
|---|---|---|---|
| AFFYID | LINK | GENE NAME | PATHWAY |
| 208745_at | 10632 | ATP synthase, H+ transporting, | ATP synthesis |
| | | mitochondrial F0 complex, subunit g | |
| 201413_at | 3295 | hydroxysteroid (17-beta) | Androgen and estrogen |
| | | dehydrogenase 4 | metabolism |
| 200797_s_at | 4170 | myeloid cell leukemia sequence 1 | Apoptosis |
| | | (BCL2-related) | |
| 201502_s_at | 4792 | nuclear factor of kappa light polypeptide | Apoptosis |
| | | gene enhancer in B-cells inhibitor, alpha | |
| 205681_at | 597 | BCL2-related protein A1 | Apoptosis |
| 207113_s_at | 7124 | tumor necrosis factor (TNF superfamily, | Apoptosis |
| | | member 2) | |
| 203508_at | 7133 | tumor necrosis factor receptor | Apoptosis |
| | | superfamily, member 1B | |
| 203984_s_at | 842 | caspase 9, apoptosis-related cysteine | Apoptosis |
| | | protease | |

### Inositol Phosphate Metabolism

| | LOCUS | | |
|---|---|---|---|
| AFFYID | LINK | GENE NAME | PATHWAY |
| 208745_at | 10632 | ATP synthase, H+ transporting, | ATP synthesis |
| | | mitochondrial F0 complex, subunit g | |
| 201413_at | 3295 | hydroxysteroid (17-beta) | Androgen and estrogen |
| | | dehydrogenase 4 | metabolism |
| 200797_s_at | 4170 | myeloid cell leukemia sequence 1 | Apoptosis |
| | | (BCL2-related) | |
| 201502_s_at | 4792 | nuclear factor of kappa light | Apoptosis |
| | | polypeptide gene enhancer in B-cells | |
| | | inhibitor, alpha | |
| 205681_at | 597 | BCL2-related protein A1 | Apoptosis |
| 207113_s_at | 7124 | tumor necrosis factor (TNF | Apoptosis |
| | | superfamily, member 2) | |
| 203508_at | 7133 | tumor necrosis factor receptor | Apoptosis |
| | | superfamily, member 1B | |
| 203984_s_at | 842 | caspase 9, apoptosis-related | Apoptosis |
| | | cysteine protease | |
| 200884_at | 1152 | creatine kinase, brain | Arginine and proline metabolism |
| 206177_s_at | 383 | arginase, liver | Arginine and proline metabolism |
| 203455_s_at | 6303 | spermidine/spermine N1- | Arginine and proline metabolism |
| | | acetyltransferase | |
| 205260_s_at | 97 | acylphosphatase 1, erythrocyte | Benzoate degradation viaCoA |
| | | (common) type | ligation |
| 204059_s_at | 4199 | malic enzyme 1, NADP(+)- | Carbon fixation |
| | | dependent, cytosolic | |
| 205899_at | 8900 | cyclin A1 | Cell cycle |
| 201700_at | 896 | cyclin D3 | Cell cycle |
| 205034_at | 9134 | cyclin E2 | Cell cycle |
| 38158_at | 9700 | extra spindle poles like 1 (S. cerevisiae) | Cell cycle |
| 204695_at | 993 | cell division cycle 25A | Cell cycle |
| 201853_s_at | 994 | cell division cycle 25B | Cell cycle |
| 205167_s_at | 995 | cell division cycle 25C | Cell cycle |
| 205053_at | 5557 | primase, polypeptide 1, 49 kDa | DNApolymerase |
| 202437_s_at | 1545 | cytochrome P450, family 1, | Fatty acid metabolism |
| | | subfamily B, polypeptide 1 | |
| 207275_s_at | 2179 | fatty-acid-Coenzyme A ligase, long- | Fatty acid metabolism |
| | | chain 1 | |
| 201963_at | 2180 | fatty-acid-Coenzyme A ligase, long- | Fatty acid metabolism |
| | | chain 2 | |
| 202554_s_at | 2947 | glutathione S-transferase M3 (brain) | Glutathione metabolism |
| 203385_at | 1606 | diacylglycerol kinase, alpha 80 kDa | Glycerolipid metabolism |
| 205260_s_at | 97 | acylphosphatase 1, erythrocyte | Glycolysis/Gluconeogenesis |
| | | (common) type | |
| 206643_at | 3034 | histidine ammonia-lyase | Histidine metabolism |
| 202794_at | 3628 | inositol polyphosphate-1-phosphatase | Inositol phosphatemetabolism |
| 204552_at | 3631 | inositol polyphosphate-4-phosphatase, | Inositol phosphatemetabolism |
| | | type I, 107 kDa | |
| 201598_s_at | 3636 | inositol polyphosphate phosphatase-like 1 | Inositol phosphatemetabolism |
| 212990_at | 8867 | synaptojanin 1 | Inositol phosphatemetabolism |

### Fatty Acid Metabolism

| | LOCUS | | |
|---|---|---|---|
| AFFYID | LINK | GENE NAME | PATHWAY |
| 208745_at | 10632 | ATP synthase, H+ transporting, | ATP synthesis |
| | | mitochondrial F0 complex, subunit g | |
| 201413_at | 3295 | hydroxysteroid (17-beta) | Androgen and estrogen |
| | | dehydrogenase 4 | metabolism |
| 200797_s_at | 4170 | myeloid cell leukemia sequence 1 | Apoptosis |
| | | (BCL2-related) | |
| 201502_s_at | 4792 | nuclear factor of kappa light | Apoptosis |
| | | polypeptide gene enhancer in B-cells | |
| | | inhibitor, alpha | |
| 205681_at | 597 | BCL2-related protein A1 | Apoptosis |
| 207113_s_at | 7124 | tumor necrosis factor (TNF | Apoptosis |
| | | superfamily, member 2) | |
| 203508_at | 7133 | tumor necrosis factor receptor | Apoptosis |
| | | superfamily, member 1B | |
| 203984_s_at | 842 | caspase 9, apoptosis-related | Apoptosis |
| | | cysteine protease | |
| 200884_at | 1152 | creatine kinase, brain | Arginine and proline metabolism |
| 206177_s_at | 383 | arginase, liver | Arginine and proline metabolism |
| 203455_s_at | 6303 | spermidine/spermine N1- | Arginine and proline metabolism |
| | | acetyltransferase | |
| 205260_s_at | 97 | acylphosphatase 1, erythrocyte | Benzoate degradation viaCoA |
| | | (common) type | ligation |
| 204059_s_at | 4199 | malic enzyme 1, NADP(+)- | Carbon fixation |
| | | dependent, cytosolic | |
| 205899_at | 8900 | cyclin A1 | Cell cycle |
| 201700_at | 896 | cyclin D3 | Cell cycle |
| 205034_at | 9134 | cyclin E2 | Cell cycle |
| 38158_at | 9700 | extra spindle poles like 1 (S. cerevisiae) | Cell cycle |
| 204695_at | 993 | cell division cycle 25A | Cell cycle |
| 201853_s_at | 994 | cell division cycle 25B | Cell cycle |
| 205167_s_at | 995 | cell division cycle 25C | Cell cycle |
| 205053_at | 5557 | primase, polypeptide 1, 49 kDa | DNApolymerase |
| 202437_s_at | 1545 | cytochrome P450, family 1, subfamily B, | Fatty acid metabolism |
| | | polypeptide 1 | |
| 207275_s_at | 2179 | fatty-acid-Coenzyme A ligase, long-chain 1 | Fatty acid metabolism |
| 201963_at | 2180 | fatty-acid-Coenzyme A ligase, long-chain 2 | Fatty acid metabolism |

VX-944 (Early) vs. VX-944 (Late): 102 genes found common between these two comparisons were binned into the following functional categories.

### Signal Transduction:

| | LOCUS | | |
|---|---|---|---|
| AFFX_ID | LINK | GENE NAME | CLASSIFICATION |
| 210942_s_at | 10402 | alpha2,3-sialyltransferase | amine metabolism |
| 202532_s_at | 1719 | dihydrofolate reductase | amine metabolism |
| 202532_s_at | 1719 | dihydrofolate reductase | amino acid and derivative |
| | | | metabolism |
| 218212_s_at | 4338 | molybdenum cofactor synthesis 2 | aromatic compound metabolism |
| 210942_s_at | 10402 | alpha2,3-sialyltransferase | biosynthesis |
| 218212_s_at | 4338 | molybdenum cofactor synthesis 2 | biosynthesis |
| 207563_s_at | 8473 | O-linked N-acetylglucosamine (GlcNAc) | biosynthesis |
| | | transferase (UDP-N- | |
| | | acetylglucosamine:polypeptide-N- | |
| | | acetylglucosaminyl transferase) | |
| 200962_at | 6160 | ribosomal protein L31 | biosynthesis |
| 204446_s_at | 240 | arachidonate 5-lipoxygenase | biosynthesis |
| 204174_at | 241 | arachidonate 5-lipoxygenase-activating | biosynthesis |
| | | protein | |
| 202532_s_at | 1719 | dihydrofolate reductase | biosynthesis |
| 208771_s_at | 4048 | leukotriene A4 hydrolase | biosynthesis |
| 210845_s_at | 5329 | plasminogen activator, urokinase receptor | blood coagulation |
| 209473_at | 953 | ectonucleoside triphosphate | blood coagulation |
| | | diphosphohydrolase 1 | |
| 210942_s_at | 10402 | alpha2,3-sialyltransferase | carbohydrate metabolism |
| 202499_s_at | 6515 | solute carrier family 2 (facilitated glucose | carbohydrate metabolism |
| | | transporter), member 3 | |
| 219373_at | 54344 | dolichyl-phosphate mannosyltransferase | carbohydrate metabolism |
| | | polypeptide 3 | |
| 206111_at | 6036 | ribonuclease, RNase A family, 2 (liver, | catabolism |
| | | eosinophil-derived neurotoxin) | |
| 201069_at | 4313 | matrix metalloproteinase 2 (gelatinase A, | catabolism |
| | | 72 kDa gelatinase, 72 kDa type IV | |
| | | collagenase) | |
| 208771_s_at | 4048 | leukotriene A4 hydrolase | catabolism |
| 212190_at | 5270 | serine (or cysteine) proteinase inhibitor, | catabolism |
| | | clade E (nexin, plasminogen activator | |
| | | inhibitor type 1), member 2 | |
| 211506_s_at | 3576 | interleukin 8 | cell adhesion |
| 209473_at | 953 | ectonucleoside triphosphate | cell adhesion |
| | | diphosphohydrolase 1 | |
| 204655_at | 6352 | chemokine (C-C motif) ligand 5 | cell adhesion |
| 205176_s_at | 23421 | integrin beta 3 binding protein (beta3- | cell adhesion |
| | | endonexin) | |
| 216250_s_at | 9404 | leupaxin | cell adhesion |
| 219890_at | 23601 | C-type (calcium dependent, carbohydrate- | cell adhesion |
| | | recognition domain) lectin, superfamily | |
| | | member 5 | |
| 208892_s_at | 1848 | dual specificity phosphatase 6 | cell death |
| 202644_s_at | 7128 | tumor necrosis factor, alpha-induced | cell death |
| | | protein 3 | |
| 214727_at | 675 | breast cancer 2, early onset | cell death |
| 214467_at | 8477 | G protein-coupled receptor 65 | cell death |
| 205681_at | 597 | BCL2-related protein A1 | cell death |
| 201710_at | 4605 | v-myb myeloblastosis viral oncogene | cell death |
| | | homolog (avian)-like 2 | |
| 204614_at | 5055 | serine (or cysteine) proteinase inhibitor, | cell death |
| | | clade B (ovalbumin), member 2 | |
| 204655_at | 6352 | chemokine (C-C motif) ligand 5 | cell homeostasis |
| 210946_at | 8611 | phosphatidic acid phosphatase type 2A | cell migration |
| 212190_at | 5270 | serine (or cysteine) proteinase inhibitor, | cell migration |
| | | clade E (nexin, plasminogen activator | |
| | | inhibitor type 1), member 2 | |
| 203358_s_at | 2146 | enhancer of zeste homolog 2 (Drosophila) | cell organization and biogenesis |
| 214727_at | 675 | breast cancer 2, early onset | cell organization and biogenesis |
| 201999_s_at | 6993 | t-complex-associated-testis-expressed 1- | cell organization and biogenesis |
| | | like 1 | |
| 205046_at | 1062 | centromere protein E, 312 kDa | cell proliferation |
| 208892_s_at | 1848 | dual specificity phosphatase 6 | cell proliferation |
| 205053_at | 5557 | primase, polypeptide 1, 49 kDa | cell proliferation |
| 203564_at | 2189 | Fanconi anemia, complementation group G | cell proliferation |
| 214727_at | 675 | breast cancer 2, early onset | cell proliferation |
| 209773_s_at | 6241 | ribonucleotide reductase M2 polypeptide | cell proliferation |
| 211506_s_at | 3576 | interleukin 8 | cell proliferation |
| 202811_at | 10617 | associated molecule with the SH3 domain | cell proliferation |
| | | of STAM | |
| 201710_at | 4605 | v-myb myeloblastosis viral oncogene | cell proliferation |
| | | homolog (avian)-like 2 | |
| 200660_at | 6282 | S100 calcium binding protein A11 | cell proliferation |
| | | (calgizzarin) | |
| 202191_s_at | 8522 | growth arrest-specific 7 | cell proliferation |
| 211506_s_at | 3576 | interleukin 8 | cell-cell signaling |
| 209473_at | 953 | ectonucleoside triphosphate | cell-cell signaling |
| | | diphosphohydrolase 1 | |
| 204655_at | 6352 | chemokine (C-C motif) ligand 5 | cell-cell signaling |
| 207339_s_at | 4050 | lymphotoxin beta (TNF superfamily, | cell-cell signaling |
| | | member 3) | |
| 205204_at | 4828 | neuromedin B | cell-cell signaling |
| 218212_s_at | 4338 | molybdenum cofactor synthesis 2 | coenzymes and prosthetic |
| | | | group metabolism |
| 203923_s_at | 1536 | cytochrome b-245, beta polypeptide | electron transport |
| | | (chronic granulomatous disease) | |
| 204446_s_at | 240 | arachidonate 5-lipoxygenase | electron transport |
| 202437_s_at | 1545 | cytochrome P450, family 1, subfamily B, | electron transport |
| | | polypeptide 1 | |
| 202942_at | 2109 | electron-transfer-flavoprotein, beta | electron transport |
| | | polypeptide | |
| 203923_s_at | 1536 | cytochrome b-245, beta polypeptide | energy pathways |
| | | (chronic granulomatous disease) | |
| 210942_s_at | 10402 | alpha2,3-sialyltransferase | lipid metabolism |
| 204446_s_at | 240 | arachidonate 5-lipoxygenase | lipid metabolism |
| 204174_at | 241 | arachidonate 5-lipoxygenase-activating | lipid metabolism |
| | | protein | |
| 201012_at | 301 | annexin A1 | lipid metabolism |
| 210946_at | 8611 | phosphatidic acid phosphatase type 2A | lipid metabolism |
| 201963_at | 2180 | fatty-acid-Coenzyme A ligase, long-chain 2 | lipid metabolism |
| 208771_s_at | 4048 | leukotriene A4 hydrolase | lipid metabolism |
| 207275_s_at | 2179 | fatty-acid-Coenzyme A ligase, long-chain 1 | lipid metabolism |
| 206066_s_at | 5889 | RAD51 homolog C (S. cerevisiae) | nucleobase, nucleoside, |
| | | | nucleotide and nucleic acid |
| | | | metabolism |
| 203358_s_at | 2146 | enhancer of zeste homolog 2 (Drosophila) | nucleobase, nucleoside, |
| | | | nucleotide and nucleic acid |
| | | | metabolism. |
| 205053_at | 5557 | primase, polypeptide 1, 49 kDa | nucleobase, nucleoside, |
| | | | nucleotide and nucleic acid |
| | | | metabolism |
| 203564_at | 2189 | Fanconi anemia, complementation group G | nucleobase, nucleoside, |
| | | | nucleotide and nucleic acid |
| | | | metabolism |
| 203409_at | 1643 | damage-specific DNA binding protein 2, | nucleobase, nucleoside, |
| | | 48 kDa | nucleotide and nucleic acid |
| | | | metabolism |
| 214727_at | 675 | breast cancer 2, early onset | nucleobase, nucleoside, |
| | | | nucleotide and nucleic acid |
| | | | metabolism |
| 209773_s_at | 6241 | ribonucleotide reductase M2 polypeptide | nucleobase, nucleoside, |
| | | | nucleotide and nucleic acid |
| | | | metabolism |
| 206111_at | 6036 | ribonuclease, RNase A family, 2 (liver, | nucleobase, nucleoside, |
| | | eosinophil-derived neurotoxin) | nucleotide and nucleic acid |
| | | | metabolism |
| 201710_at | 4605 | v-myb myeloblastosis viral oncogene | nucleobase, nucleoside, |
| | | homolog (avian)-like 2 | nucleotide and nucleic acid |
| | | | metabolism |
| 200660_at | 6282 | S100 calcium binding protein A11 | nucleobase, nucleoside, |
| | | (calgizzarin) | nucleotide and nucleic acid |
| | | | metabolism |
| 202532_s_at | 1719 | dihydrofolate reductase | nucleobase, nucleoside, |
| | | | nucleotide and nucleic acid |
| | | | metabolism |
| 202532_s_at | 1719 | dihydrofolate reductase | one-carbon compound |
| | | | metabolism |
| 204446_s_at | 240 | arachidonate 5-lipoxygenase | organic acid metabolism |
| 204174_at | 241 | arachidonate 5-lipoxygenase-activating | organic acid metabolism |
| | | protein | |
| 202532_s_at | 1719 | dihydrofolate reductase | organic acid metabolism |
| 201963_at | 2180 | fatty-acid-Coenzyme A ligase, long-chain 2 | organic acid metabolism |
| 208771_s_at | 4048 | leukotriene A4 hydrolase | organic acid metabolism |
| 207275_s_at | 2179 | fatty-acid-Coenzyme A ligase, long-chain 1 | organic acid metabolism |
| 206734_at | 8690 | jerky homolog-like (mouse) | organogenesis |
| 211506_s_at | 3576 | interleukin 8 | organogenesis |
| 205807_s_at | 7286 | tuftelin 1 | organogenesis |
| 202191_s_at | 8522 | growth arrest-specific 7 | organogenesis |
| 218224_at | 9240 | paraneoplastic antigen MA1 | organogenesis |
| 202437_s_at | 1545 | cytochrome P450, family 1, subfamily B, | organogenesis |
| | | polypeptide 1 | |
| 201908_at | 1857 | dishevelled, dsh homolog 3 (Drosophila) | organogenesis |
| 202554_s_at | 2947 | glutathione S-transferase M3 (brain) | organogenesis |
| 205807_s_at | 7286 | tuftelin 1 | ossification |
| 204655_at | 6352 | chemokine (C-C motif) ligand 5 | oxygen and reactive oxygen |
| | | | species metabolism |
| 202554_s_at | 2947 | glutathione S-transferase M3 (brain) | oxygen and reactive oxygen |
| | | | species metabolism |
| 202437_s_at | 1545 | cytochrome P450, family 1, subfamily B, | perception of external stimulus |
| | | polypeptide 1 | |
| 208892_s_at | 1848 | dual specificity phosphatase 6 | phosphorus metabolism |
| 209457_at | 1847 | dual specificity phosphatase 5 | phosphorus metabolism |
| 221563_at | 11221 | dual specificity phosphatase 10 | phosphorus metabolism |
| 205260_s_at | 97 | acylphosphatase 1, erythrocyte (common) | phosphorus metabolism |
| | | type | |
| 221840_at | 5791 | protein tyrosine phosphatase, receptor | phosphorus metabolism |
| | | type, E | |
| 208892_s_at | 1848 | dual specificity phosphatase 6 | programmed cell death |
| 202644_s_at | 7128 | tumor necrosis factor, alpha-induced | programmed cell death |
| | | protein 3 | |
| 214727_at | 675 | breast cancer 2, early onset | programmed cell death |
| 214467_at | 8477 | G protein-coupled receptor 65 | programmed cell death |
| 205681_at | 597 | BCL2-related protein A1 | programmed cell death |
| 201710_at | 4605 | v-myb myeloblastosis viral oncogene | programmed cell death |
| | | homolog (avian)-like 2 | |
| 204614_at | 5055 | serine (or cysteine) proteinase inhibitor, | programmed cell death |
| | | clade B (ovalbumin), member 2 | |
| 208892_s_at | 1848 | dual specificity phosphatase 6 | protein metabolism |
| 209457_at | 1847 | dual specificity phosphatase 5 | protein metabolism |
| 210942_s_at | 10402 | alpha2,3-sialyltransferase | protein metabolism |
| 221563_at | 11221 | dual specificity phosphatase 10 | protein metabolism |
| 207563_s_at | 8473 | O-linked N-acetylglucosamine (GlcNAc) | protein metabolism |
| | | transferase (UDP-N- | |
| | | acetylglucosamine:polypeptide-N- | |
| | | acetylglucosaminyl transferase) | |
| 200962_at | 6160 | ribosomal protein L31 | protein metabolism |
| 216250_s_at | 9404 | leupaxin | protein metabolism |
| 201069_at | 4313 | matrix metalloproteinase 2 (gelatinase A, | protein metabolism |
| | | 72 kDa gelatinase, 72 kDa type IV | |
| | | collagenase) | |
| 221840_at | 5791 | protein tyrosine phosphatase, receptor | protein metabolism |
| | | type, E | |
| 208771_s_at | 4048 | leukotriene A4 hydrolase | protein metabolism |
| 212190_at | 5270 | serine (or cysteine) proteinase inhibitor, | protein metabolism |
| | | clade E (nexin, plasminogen activator | |
| | | inhibitor type 1), member 2 | |
| 212190_at | 5270 | serine (or cysteine) proteinase inhibitor, | regulation of metabolism |
| | | clade E (nexin, plasminogen activator | |
| | | inhibitor type 1), member 2 | |
| 205557_at | 671 | bactericidal/permeability-increasing protein | response to abiotic stimulus |
| 207563_s_at | 8473 | O-linked N-acetylglucosamine (GlcNAc) | response to abiotic stimulus |
| | | transferase (UDP-N- | |
| | | acetylglucosamine:polypeptide-N- | |
| | | acetylglucosaminyl transferase) | |
| 202437_s_at | 1545 | cytochrome P450, family 1, subfamily B, | response to abiotic stimulus |
| | | polypeptide 1 | |
| 211506_s_at | 3576 | interleukin 8 | response to biotic stimulus |
| 214467_at | 8477 | G protein-coupled receptor 65 | response to biotic stimulus |
| 205419_at | 1880 | Epstein-Barr virus induced gene 2 | response to biotic stimulus |
| | | (lymphocyte-specific G protein-coupled | |
| | | receptor) | |
| 205557_at | 671 | bactericidal/permeability-increasing protein | response to biotic stimulus |
| 209473_at | 953 | ectonucleoside triphosphate | response to biotic stimulus |
| | | diphosphohydrolase 1 | |
| 203923_s_at | 1536 | cytochrome b-245, beta polypeptide | response to biotic stimulus |
| | | (chronic granulomatous disease) | |
| 204655_at | 6352 | chemokine (C-C motif) ligand 5 | response to biotic stimulus |
| 204446_s_at | 240 | arachidonate 5-lipoxygenase | response to biotic stimulus |
| 204174_at | 241 | arachidonate 5-lipoxygenase-activating | response to biotic stimulus |
| | | protein | |
| 207339_s_at | 4050 | lymphotoxin beta (TNF superfamily, | response to biotic stimulus |
| | | member 3) | |
| 201012_at | 301 | annexin A1 | response to biotic stimulus |
| 208771_s_at | 4048 | leukotriene A4 hydrolase | response to biotic stimulus |
| 209575_at | 3588 | interleukin 10 receptor, beta | response to biotic stimulus |
| 216950_s_at | 2209 | Fc fragment of IgG, high affinity Ia, receptor | response to biotic stimulus |
| | | for (CD64) | |
| 205269_at | 3937 | lymphocyte cytosolic protein 2 (SH2 | response to biotic stimulus |
| | | domain containing leukocyte protein of | |
| | | 76 kDa) | |
| 207563_s_at | 8473 | O-linked N-acetylglucosamine (GlcNAc) | response to extracellular |
| | | transferase (UDP-N- | stimulus |
| | | acetylglucosamine:polypeptide-N- | |
| | | acetylglucosaminyl transferase) | |
| 204655_at | 6352 | chemokine (C-C motif) ligand 5 | response to oxidative stress |
| 211506_s_at | 3576 | interleukin 8 | response to |
| | | | pest/pathogen/parasite |
| 209473_at | 953 | ectonucleoside triphosphate | response to |
| | | diphosphohydrolase 1 | pest/pathogen/parasite |
| 203923_s_at | 1536 | cytochrome b-245, beta polypeptide | response to |
| | | (chronic granulomatous disease) | pest/pathogen/parasite |
| 204655_at | 6352 | chemokine (C-C motif) ligand 5 | response to |
| | | | pest/pathogen/parasite |
| 204446_s_at | 240 | arachidonate 5-lipoxygenase | response to |
| | | | pest/pathogen/parasite |
| 204174_at | 241 | arachidonate 5-lipoxygenase-activating | response to |
| | | protein | pest/pathogen/parasite |
| 201012_at | 301 | annexin A1 | response to |
| | | | pest/pathogen/parasite |
| 208771_s_at | 4048 | leukotriene A4 hydrolase | response to |
| | | | pest/pathogen/parasite |
| 209575_at | 3588 | interleukin 10 receptor, beta | response to |
| | | | pest/pathogen/parasite |
| 211506_s_at | 3576 | interleukin 8 | response to wounding |
| 203923_s_at | 1536 | cytochrome b-245, beta polypeptide | response to wounding |
| | | (chronic granulomatous disease) | |
| 204655_at | 6352 | chemokine (C-C motif) ligand 5 | response to wounding |
| 204446_s_at | 240 | arachidonate 5-lipoxygenase | response to wounding |
| 204174_at | 241 | arachidonate 5-lipoxygenase-activating | response to wounding |
| | | protein | |
| 201012_at | 301 | annexin A1 | response to wounding |
| 208771_s_at | 4048 | leukotriene A4 hydrolase | response to wounding |
| 209575_at | 3588 | interleukin 10 receptor, beta | response to wounding |
| 210946_at | 8611 | phosphatidic acid phosphatase type 2A | sexual reproduction |
| 218224_at | 9240 | paraneoplastic antigen MA1 | sexual reproduction |
| 208892_s_at | 1848 | dual specificity phosphatase 6 | signal transduction |
| 211506_s_at | 3576 | interleukin 8 | signal transduction |
| 214467_at | 8477 | G protein-coupled receptor 65 | signal transduction |
| 205419_at | 1880 | Epstein-Barr virus induced gene 2 (lymphocyte- | signal transduction |
| | | specific G protein-coupled receptor) | |
| 210845_s_at | 5329 | plasminogen activator, urokinase receptor | signal transduction |
| 202207_at | 10123 | ADP-ribosylation factor-like 7 | signal transduction |
| 210840_s_at | 8826 | IQ motif containing GTPase activating protein 1 | signal transduction |
| 202811_at | 10617 | associated molecule with the SH3 domain of | signal transduction |
| | | STAM | |
| 221563_at | 11221 | dual specificity phosphatase 10 | signal transduction |
| 207563_s_at | 8473 | O-linked N-acetylglucosamine (GlcNAc) | signal transduction |
| | | transferase (UDP-N- | |
| | | acetylglucosamine:polypeptide-N- | |
| | | acetylglucosaminyl transferase) | |
| 221830_at | 5911 | RAP2A, member of RAS oncogene family | signal transduction |
| 204655_at | 6352 | chemokine (C-C motif) ligand 5 | signal transduction |
| 217941_s_at | 55914 | erbb2 interacting protein | signal transduction |
| 207339_s_at | 4050 | lymphotoxin beta (TNF superfamily, member 3) | signal transduction |
| 201012_at | 301 | annexin A1 | signal transduction |
| 205176_s_at | 23421 | integrin beta 3 binding protein (beta3-endonexin) | signal transduction |
| 216250_s_at | 9404 | leupaxin | signal transduction |
| 209288_s_at | 10602 | CDC42 effector protein (Rho GTPase binding) 3 | signal transduction |
| 205204_at | 4828 | neuromedin B | signal transduction |
| 201908_at | 1857 | dishevelled, dsh homolog 3 (Drosophila) | signal transduction |
| 209575_at | 3588 | interleukin 10 receptor, beta | signal transduction |
| 216950_s_at | 2209 | Fc fragment of IgG, high affinity Ia, receptor for | signal transduction |
| | | (CD64) | |
| 205269_at | 3937 | lymphocyte cytosolic protein 2 (SH2 domain | signal transduction |
| | | containing leukocyte protein of 76 kDa) | |

### Response to Biotic Stimulus

| | LOCUS | | |
|---|---|---|---|
| AFFX_ID | LINK | GENE NAME | CLASSIFICATION |
| 210942_s_at | 10402 | alpha2,3-sialyltransferase | amine metabolism |
| 202532_s_at | 1719 | dihydrofolate reductase | amine metabolism |
| 202532_s_at | 1719 | dihydrofolate reductase | amino acid and derivative |
| | | | metabolism |
| 218212_s_at | 4338 | molybdenum cofactor synthesis 2 | aromatic compound metabolism |
| 210942_s_at | 10402 | alpha2,3-sialyltransferase | biosynthesis |
| 218212_s_at | 4338 | molybdenum cofactor synthesis 2 | biosynthesis |
| 207563_s_at | 8473 | O-linked N-acetylglucosamine (GlcNAc) | biosynthesis |
| | | transferase (UDP-N- | |
| | | acetylglucosamine:polypeptide-N- | |
| | | acetylglucosaminyl transferase) | |
| 200962_at | 6160 | ribosomal protein L31 | biosynthesis |
| 204446_s_at | 240 | arachidonate 5-lipoxygenase | biosynthesis |
| 204174_at | 241 | arachidonate 5-lipoxygenase-activating | biosynthesis |
| | | protein | |
| 202532_s_at | 1719 | dihydrofolate reductase | biosynthesis |
| 208771_s_at | 4048 | leukotriene A4 hydrolase | biosynthesis |
| 210845_s_at | 5329 | plasminogen activator, urokinase receptor | blood coagulation |
| 209473_at | 953 | ectonucleoside triphosphate | blood coagulation |
| | | diphosphohydrolase 1 | |
| 210942_s_at | 10402 | alpha2,3-sialyltransferase | carbohydrate metabolism |
| 202499_s_at | 6515 | solute carrier family 2 (facilitated glucose | carbohydrate metabolism |
| | | transporter), member 3 | |
| 219373_at | 54344 | dolichyl-phosphate mannosyltransferase | carbohydrate metabolism |
| | | polypeptide 3 | |
| 206111_at | 6036 | ribonuclease, RNase A family, 2 (liver, | catabolism |
| | | eosinophil-derived neurotoxin) | |
| 201069_at | 4313 | matrix metalloproteinase 2 (gelatinase A, | catabolism |
| | | 72 kDa gelatinase, 72 kDa type IV | |
| | | collagenase) | |
| 208771_s_at | 4048 | leukotriene A4 hydrolase | catabolism |
| 212190_at | 5270 | serine (or cysteine) proteinase inhibitor, | catabolism |
| | | clade E (nexin, plasminogen activator | |
| | | inhibitor type 1), member 2 | |
| 211506_s_at | 3576 | interleukin 8 | cell adhesion |
| 209473_at | 953 | ectonucleoside triphosphate | cell adhesion |
| | | diphosphohydrolase 1 | |
| 204655_at | 6352 | chemokine (C-C motif) ligand 5 | cell adhesion |
| 205176_s_at | 23421 | integrin beta 3 binding protein (beta3- | cell adhesion |
| | | endonexin) | |
| 216250_s_at | 9404 | leupaxin | cell adhesion |
| 219890_at | 23601 | C-type (calcium dependent, carbohydrate- | cell adhesion |
| | | recognition domain) lectin, superfamily | |
| | | member 5 | |
| 208892_s_at | 1848 | dual specificity phosphatase 6 | cell death |
| 202644_s_at | 7128 | tumor necrosis factor, alpha-induced | cell death |
| | | protein 3 | |
| 214727_at | 675 | breast cancer 2, early onset | cell death |
| 214467_at | 8477 | G protein-coupled receptor 65 | cell death |
| 205681_at | 597 | BCL2-related protein A1 | cell death |
| 201710_at | 4605 | v-myb myeloblastosis viral oncogene | cell death |
| | | homolog (avian)-like 2 | |
| 204614_at | 5055 | serine (or cysteine) proteinase inhibitor, | cell death |
| | | clade B (ovalbumin), member 2 | |
| 204655_at | 6352 | chemokine (C-C motif) ligand 5 | cell homeostasis |
| 210946_at | 8611 | phosphatidic acid phosphatase type 2A | cell migration |
| 212190_at | 5270 | serine (or cysteine) proteinase inhibitor, | cell migration |
| | | clade E (nexin, plasminogen activator | |
| | | inhibitor type 1), member 2 | |
| 203358_s_at | 2146 | enhancer of zeste homolog 2 (Drosophila) | cell organization and biogenesis |
| 214727_at | 675 | breast cancer 2, early onset | cell organization and biogenesis |
| 201999_s_at | 6993 | t-complex-associated-testis-expressed 1- | cell organization and biogenesis |
| | | like 1 | |
| 205046_at | 1062 | centromere protein E, 312 kDa | cell proliferation |
| 208892_s_at | 1848 | dual specificity phosphatase 6 | cell proliferation |
| 205053_at | 5557 | primase, polypeptide 1, 49 kDa | cell proliferation |
| 203564_at | 2189 | Fanconi anemia, complementation group G | cell proliferation |
| 214727_at | 675 | breast cancer 2, early onset | cell proliferation |
| 209773_s_at | 6241 | ribonucleotide reductase M2 polypeptide | cell proliferation |
| 211506_s_at | 3576 | interleukin 8 | cell proliferation |
| 202811_at | 10617 | associated molecule with the SH3 domain | cell proliferation |
| | | of STAM | |
| 201710_at | 4605 | v-myb myeloblastosis viral oncogene | cell proliferation |
| | | homolog (avian)-like 2 | |
| 200660_at | 6282 | S100 calcium binding protein A11 | cell proliferation |
| | | (calgizzarin) | |
| 202191_s_at | 8522 | growth arrest-specific 7 | cell proliferation |
| 211506_s_at | 3576 | interleukin 8 | cell-cell signaling |
| 209473_at | 953 | ectonucleoside triphosphate | cell-cell signaling |
| | | diphosphohydrolase 1 | |
| 204655_at | 6352 | chemokine (C-C motif) ligand 5 | cell-cell signaling |
| 207339_s_at | 4050 | lymphotoxin beta (TNF superfamily, | cell-cell signaling |
| | | member 3) | |
| 205204_at | 4828 | neuromedin B | cell-cell signaling |
| 218212_s_at | 4338 | molybdenum cofactor synthesis 2 | coenzymes and prosthetic |
| | | | group metabolism |
| 203923_s_at | 1536 | cytochrome b-245, beta polypeptide | electron transport |
| | | (chronic granulomatous disease) | |
| 204446_s_at | 240 | arachidonate 5-lipoxygenase | electron transport |
| 202437_s_at | 1545 | cytochrome P450, family 1, subfamily B, | electron transport |
| | | polypeptide 1 | |
| 202942_at | 2109 | electron-transfer-flavoprotein, beta | electron transport |
| | | polypeptide | |
| 203923_s_at | 1536 | cytochrome b-245, beta polypeptide | energy pathways |
| | | (chronic granulomatous disease) | |
| 210942_s_at | 10402 | alpha2,3-sialyltransferase | lipid metabolism |
| 204446_s_at | 240 | arachidonate 5-lipoxygenase | lipid metabolism |
| 204174_at | 241 | arachidonate 5-lipoxygenase-activating | lipid metabolism |
| | | protein | |
| 201012_at | 301 | annexin A1 | lipid metabolism |
| 210946_at | 8611 | phosphatidic acid phosphatase type 2A | lipid metabolism |
| 201963_at | 2180 | fatty-acid-Coenzyme A ligase, long-chain 2 | lipid metabolism |
| 208771_s_at | 4048 | leukotriene A4 hydrolase | lipid metabolism |
| 207275_s_at | 2179 | fatty-acid-Coenzyme A ligase, long-chain 1 | lipid metabolism |
| 206066_s_at | 5889 | RAD51 homolog C (S. cerevisiae) | nucleobase, nucleoside, |
| | | | nucleotide and nucleic acid |
| | | | metabolism |
| 203358_s_at | 2146 | enhancer of zeste homolog 2 (Drosophila) | nucleobase, nucleoside, |
| | | | nucleotide and nucleic acid |
| | | | metabolism |
| 205053_at | 5557 | primase, polypeptide 1, 49 kDa | nucleobase, nucleoside, |
| | | | nucleotide and nucleic acid |
| | | | metabolism |
| 203564_at | 2189 | Fanconi anemia, complementation group G | nucleobase, nucleoside, |
| | | | nucleotide and nucleic acid |
| | | | metabolism |
| 203409_at | 1643 | damage-specific DNA binding protein 2, | nucleobase, nucleoside, |
| | | 48 kDa | nucleotide and nucleic acid |
| | | | metabolism |
| 214727_at | 675 | breast cancer 2, early onset | nucleobase, nucleoside, |
| | | | nucleotide and nucleic acid |
| | | | metabolism |
| 209773_s_at | 6241 | ribonucleotide reductase M2 polypeptide | nucleobase, nucleoside, |
| | | | nucleotide and nucleic acid |
| | | | metabolism |
| 206111_at | 6036 | ribonuclease, RNase A family, 2 (liver, | nucleobase, nucleoside, |
| | | eosinophil-derived neurotoxin) | nucleotide and nucleic acid |
| | | | metabolism |
| 201710_at | 4605 | v-myb myeloblastosis viral oncogene | nucleobase, nucleoside, |
| | | homolog (avian)-like 2 | nucleotide and nucleic acid |
| | | | metabolism |
| 200660_at | 6282 | S100 calcium binding protein A11 | nucleobase, nucleoside, |
| | | (calgizzarin) | nucleotide and nucleic acid |
| | | | metabolism |
| 202532_s_at | 1719 | dihydrofolate reductase | nucleobase, nucleoside, |
| | | | nucleotide and nucleic acid |
| | | | metabolism |
| 202532_s_at | 1719 | dihydrofolate reductase | one-carbon compound |
| | | | metabolism |
| 204446_s_at | 240 | arachidonate 5-lipoxygenase | organic acid metabolism |
| 204174_at | 241 | arachidonate 5-lipoxygenase-activating | organic acid metabolism |
| | | protein | |
| 202532_s_at | 1719 | dihydrofolate reductase | organic acid metabolism |
| 201963_at | 2180 | fatty-acid-Coenzyme A ligase, long-chain 2 | organic acid metabolism |
| 208771_s_at | 4048 | leukotriene A4 hydrolase | organic acid metabolism |
| 207275_s_at | 2179 | fatty-acid-Coenzyme A ligase, long-chain 1 | organic acid metabolism |
| 206734_at | 8690 | jerky homolog-like (mouse) | organogenesis |
| 211506_s_at | 3576 | interleukin 8 | organogenesis |
| 205807_s_at | 7286 | tuftelin 1 | organogenesis |
| 202191_s_at | 8522 | growth arrest-specific 7 | organogenesis |
| 218224_at | 9240 | paraneoplastic antigen MA1 | organogenesis |
| 202437_s_at | 1545 | cytochrome P450, family 1, subfamily B, | organogenesis |
| | | polypeptide 1 | |
| 201908_at | 1857 | dishevelled, dsh homolog 3 (Drosophila) | organogenesis |
| 202554_s_at | 2947 | glutathione S-transferase M3 (brain) | organogenesis |
| 205807_s_at | 7286 | tuftelin 1 | ossification |
| 204655_at | 6352 | chemokine (C-C motif) ligand 5 | oxygen and reactive oxygen |
| | | | species metabolism |
| 202554_s_at | 2947 | glutathione S-transferase M3 (brain) | oxygen and reactive oxygen |
| | | | species metabolism |
| 202437_s_at | 1545 | cytochrome P450, family 1, subfamily B, | perception of external stimulus |
| | | polypeptide 1 | |
| 208892_s_at | 1848 | dual specificity phosphatase 6 | phosphorus metabolism |
| 209457_at | 1847 | dual specificity phosphatase 5 | phosphorus metabolism |
| 221563_at | 11221 | dual specificity phosphatase 10 | phosphorus metabolism |
| 205260_s_at | 97 | acylphosphatase 1, erythrocyte (common) | phosphorus metabolism |
| | | type | |
| 221840_at | 5791 | protein tyrosine phosphatase, receptor | phosphorus metabolism |
| | | type, E | |
| 208892_s_at | 1848 | dual specificity phosphatase 6 | programmed cell death |
| 202644_s_at | 7128 | tumor necrosis factor, alpha-induced | programmed cell death |
| | | protein 3 | |
| 214727_at | 675 | breast cancer 2, early onset | programmed cell death |
| 214467_at | 8477 | G protein-coupled receptor 65 | programmed cell death |
| 205681_at | 597 | BCL2-related protein A1 | programmed cell death |
| 201710_at | 4605 | v-myb myeloblastosis viral oncogene | programmed cell death |
| | | homolog (avian)-like 2 | |
| 204614_at | 5055 | serine (or cysteine) proteinase inhibitor, | programmed cell death |
| | | clade B (ovalbumin), member 2 | |
| 208892_s_at | 1848 | dual specificity phosphatase 6 | protein metabolism |
| 209457_at | 1847 | dual specificity phosphatase 5 | protein metabolism |
| 210942_s_at | 10402 | alpha2,3-sialyltransferase | protein metabolism |
| 221563_at | 11221 | dual specificity phosphatase 10 | protein metabolism |
| 207563_s_at | 8473 | O-linked N-acetylglucosamine (GlcNAc) | protein metabolism |
| | | transferase (UDP-N- | |
| | | acetylglucosamine:polypeptide-N- | |
| | | acetylglucosaminyl transferase) | |
| 200962_at | 6160 | ribosomal protein L31 | protein metabolism |
| 216250_s_at | 9404 | leupaxin | protein metabolism |
| 201069_at | 4313 | matrix metalloproteinase 2 (gelatinase A, | protein metabolism |
| | | 72 kDa gelatinase, 72 kDa type IV | |
| | | collagenase) | |
| 221840_at | 5791 | protein tyrosine phosphatase, receptor | protein metabolism |
| | | type, E | |
| 208771_s_at | 4048 | leukotriene A4 hydrolase | protein metabolism |
| 212190_at | 5270 | serine (or cysteine) proteinase inhibitor, | protein metabolism |
| | | clade E (nexin, plasminogen activator | |
| | | inhibitor type 1), member 2 | |
| 212190_at | 5270 | serine (or cysteine) proteinase inhibitor, | regulation of metabolism |
| | | clade E (nexin, plasminogen activator | |
| | | inhibitor type 1), member 2 | |
| 205557_at | 671 | bactericidal/permeability-increasing protein | response to abiotic stimulus |
| 207563_s_at | 8473 | O-linked N-acetylglucosamine (GlcNAc) | response to abiotic stimulus |
| | | transferase (UDP-N- | |
| | | acetylglucosamine:polypeptide-N- | |
| | | acetylglucosaminyl transferase) | |
| 202437_s_at | 1545 | cytochrome P450, family 1, subfamily B, | response to abiotic stimulus |
| | | polypeptide 1 | |
| 211506_s_at | 3576 | interleukin 8 | response to biotic stimulus |
| 214467_at | 8477 | G protein-coupled receptor 65 | response to biotic stimulus |
| 205419_at | 1880 | Epstein-Barr virus induced gene 2 | response to biotic stimulus |
| | | (lymphocyte-specific G protein-coupled | |
| | | receptor) | |
| 205557_at | 671 | bactericidal/permeability-increasing protein | response to biotic stimulus |
| 209473_at | 953 | ectonucleoside triphosphate | response to biotic stimulus |
| | | diphosphohydrolase 1 | |
| 203923_s_at | 1536 | cytochrome b-245, beta polypeptide (chronic | response to biotic stimulus |
| | | granulomatous disease) | |
| 204655_at | 6352 | chemokine (C-C motif) ligand 5 | response to biotic stimulus |
| 204446_s_at | 240 | arachidonate 5-lipoxygenase | response to biotic stimulus |
| 204174_at | 241 | arachidonate 5-lipoxygenase-activating | response to biotic stimulus |
| | | protein | |
| 207339_s_at | 4050 | lymphotoxin beta (TNF superfamily, member | response to biotic stimulus |
| | | 3) | |
| 201012_at | 301 | annexin A1 | response to biotic stimulus |
| 208771_s_at | 4048 | leukotriene A4 hydrolase | response to biotic stimulus |
| 209575_at | 3588 | interleukin 10 receptor, beta | response to biotic stimulus |
| 216950_s_at | 2209 | Fc fragment of IgG, high affinity Ia, receptor | response to biotic stimulus |
| | | for (CD64) | |
| 205269_at | 3937 | lymphocyte cytosolic protein 2 (SH2 domain | response to biotic stimulus |
| | | containing leukocyte protein of 76 kDa) | |

### Cell Proliferation

| | LOCUS | | |
|---|---|---|---|
| AFFX_ID | LINK | GENE NAME | CLASSIFICATION |
| 210942_s_at | 10402 | alpha2,3-sialyltransferase | amine metabolism |
| 202532_s_at | 1719 | dihydrofolate reductase | amine metabolism |
| 202532_s_at | 1719 | dihydrofolate reductase | amino acid and derivative |
| | | | metabolism |
| 218212_s_at | 4338 | molybdenum cofactor synthesis 2 | aromatic compound metabolism |
| 210942_s_at | 10402 | alpha2,3-sialyltransferase | biosynthesis |
| 218212_s_at | 4338 | molybdenum cofactor synthesis 2 | biosynthesis |
| 207563_s_at | 8473 | O-linked N-acetylglucosamine (GlcNAc) | biosynthesis |
| | | transferase (UDP-N- | |
| | | acetylglucosamine:polypeptide-N- | |
| | | acetylglucosaminyl transferase) | |
| 200962_at | 6160 | ribosomal protein L31 | biosynthesis |
| 204446_s_at | 240 | arachidonate 5-lipoxygenase | biosynthesis |
| 204174_at | 241 | arachidonate 5-lipoxygenase-activating | biosynthesis |
| | | protein | |
| 202532_s_at | 1719 | dihydrofolate reductase | biosynthesis |
| 208771_s_at | 4048 | leukotriene A4 hydrolase | biosynthesis |
| 210845_s_at | 5329 | plasminogen activator, urokinase | blood coagulation |
| | | receptor | |
| 209473_at | 953 | ectonucleoside triphosphate | blood coagulation |
| | | diphosphohydrolase 1 | |
| 210942_s_at | 10402 | alpha2,3-sialyltransferase | carbohydrate metabolism |
| 202499_s_at | 6515 | solute carrier family 2 (facilitated glucose | carbohydrate metabolism |
| | | transporter), member 3 | |
| 219373_at | 54344 | dolichyl-phosphate mannosyltransferase | carbohydrate metabolism |
| | | polypeptide 3 | |
| 206111_at | 6036 | ribonuclease, RNase A family, 2 (liver, | catabolism |
| | | eosinophil-derived neurotoxin) | |
| 201069_at | 4313 | matrix metalloproteinase 2 (gelatinase A, | catabolism |
| | | 72 kDa gelatinase, 72 kDa type IV | |
| | | collagenase) | |
| 208771_s_at | 4048 | leukotriene A4 hydrolase | catabolism |
| 212190_at | 5270 | serine (or cysteine) proteinase inhibitor, | catabolism |
| | | clade E (nexin, plasminogen activator | |
| | | inhibitor type 1), member 2 | |
| 211506_s_at | 3576 | interleukin 8 | cell adhesion |
| 209473_at | 953 | ectonucleoside triphosphate | cell adhesion |
| | | diphosphohydrolase 1 | |
| 204655_at | 6352 | chemokine (C-C motif) ligand 5 | cell adhesion |
| 205176_s_at | 23421 | integrin beta 3 binding protein (beta3- | cell adhesion |
| | | endonexin) | |
| 216250_s_at | 9404 | leupaxin | cell adhesion |
| 219890_at | 23601 | C-type (calcium dependent, | cell adhesion |
| | | carbohydrate-recognition domain) lectin, | |
| | | superfamily member 5 | |
| 208892_s_at | 1848 | dual specificity phosphatase 6 | cell death |
| 202644_s_at | 7128 | tumor necrosis factor, alpha-induced | cell death |
| | | protein 3 | |
| 214727_at | 675 | breast cancer 2, early onset | cell death |
| 214467_at | 8477 | G protein-coupled receptor 65 | cell death |
| 205681_at | 597 | BCL2-related protein A1 | cell death |
| 201710_at | 4605 | v-myb myeloblastosis viral oncogene | cell death |
| | | homolog (avian)-like 2 | |
| 204614_at | 5055 | serine (or cysteine) proteinase inhibitor, | cell death |
| | | clade B (ovalbumin), member 2 | |
| 204655_at | 6352 | chemokine (C-C motif) ligand 5 | cell homeostasis |
| 210946_at | 8611 | phosphatidic acid phosphatase type 2A | cell migration |
| 212190_at | 5270 | serine (or cysteine) proteinase inhibitor, | cell migration |
| | | clade E (nexin, plasminogen activator | |
| | | inhibitor type 1), member 2 | |
| 203358_s_at | 2146 | enhancer of zeste homolog 2 | cell organization and biogenesis |
| | | (Drosophila) | |
| 214727_at | 675 | breast cancer 2, early onset | cell organization and biogenesis |
| 201999_s_at | 6993 | t-complex-associated-testis-expressed 1- | cell organization and biogenesis |
| | | like 1 | |
| 205046_at | 1062 | centromere protein E, 312 kDa | cell proliferation |
| 208892_s_at | 1848 | dual specificity phosphatase 6 | cell proliferation |
| 205053_at | 5557 | primase, polypeptide 1, 49 kDa | cell proliferation |
| 203564_at | 2189 | Fanconi anemia, complementation group G | cell proliferation |
| 214727_at | 675 | breast cancer 2, early onset | cell proliferation |
| 209773_s_at | 6241 | ribonucleotide reductase M2 polypeptide | cell proliferation |
| 211506_s_at | 3576 | interleukin 8 | cell proliferation |
| 202811_at | 10617 | associated molecule with the SH3 domain of | cell proliferation |
| | | STAM | |
| 201710_at | 4605 | v-myb myeloblastosis viral oncogene | cell proliferation |
| | | homolog (avian)-like 2 | |
| 200660_at | 6282 | S100 calcium binding protein A11 | cell proliferation |
| | | (calgizzarin) | |
| 202191_s_at | 8522 | growth arrest-specific 7 | cell proliferation |

### Nucleotide Metabolism

| | LOCUS | | |
|---|---|---|---|
| AFFX_ID | LINK | GENE NAME | CLASSIFICATION |
| 210942_s_at | 10402 | alpha2,3-sialyltransferase | amine metabolism |
| 202532_s_at | 1719 | dihydrofolate reductase | amine metabolism |
| 202532_s_at | 1719 | dihydrofolate reductase | amino acid and derivative |
| | | | metabolism |
| 218212_s_at | 4338 | molybdenum cofactor synthesis 2 | aromatic compound metabolism |
| 210942_s_at | 10402 | alpha2,3-sialyltransferase | biosynthesis |
| 218212_s_at | 4338 | molybdenum cofactor synthesis 2 | biosynthesis |
| 207563_s_at | 8473 | O-linked N-acetylglucosamine (GlcNAc) | biosynthesis |
| | | transferase (UDP-N- | |
| | | acetylglucosamine:polypeptide-N- | |
| | | acetylglucosaminyl transferase) | |
| 200962_at | 6160 | ribosomal protein L31 | biosynthesis |
| 204446_s_at | 240 | arachidonate 5-lipoxygenase | biosynthesis |
| 204174_at | 241 | arachidonate 5-lipoxygenase-activating | biosynthesis |
| | | protein | |
| 202532_s_at | 1719 | dihydrofolate reductase | biosynthesis |
| 208771_s_at | 4048 | leukotriene A4 hydrolase | biosynthesis |
| 210845_s_at | 5329 | plasminogen activator, urokinase | blood coagulation |
| | | receptor | |
| 209473_at | 953 | ectonucleoside triphosphate | blood coagulation |
| | | diphosphohydrolase 1 | |
| 210942_s_at | 10402 | alpha2,3-sialyltransferase | carbohydrate metabolism |
| 202499_s_at | 6515 | solute carrier family 2 (facilitated glucose | carbohydrate metabolism |
| | | transporter), member 3 | |
| 219373_at | 54344 | dolichyl-phosphate mannosyltransferase | carbohydrate metabolism |
| | | polypeptide 3 | |
| 206111_at | 6036 | ribonuclease, RNase A family, 2 (liver, | catabolism |
| | | eosinophil-derived neurotoxin) | |
| 201069_at | 4313 | matrix metalloproteinase 2 (gelatinase A, | catabolism |
| | | 72 kDa gelatinase, 72 kDa type IV | |
| | | collagenase) | |
| 208771_s_at | 4048 | leukotriene A4 hydrolase | catabolism |
| 212190_at | 5270 | serine (or cysteine) proteinase inhibitor, | catabolism |
| | | clade E (nexin, plasminogen activator | |
| | | inhibitor type 1), member 2 | |
| 211506_s_at | 3576 | interleukin 8 | cell adhesion |
| 209473_at | 953 | ectonucleoside triphosphate | cell adhesion |
| | | diphosphohydrolase 1 | |
| 204655_at | 6352 | chemokine (C-C motif) ligand 5 | cell adhesion |
| 205176_s_at | 23421 | integrin beta 3 binding protein (beta3- | cell adhesion |
| | | endonexin) | |
| 216250_s_at | 9404 | leupaxin | cell adhesion |
| 219890_at | 23601 | C-type (calcium dependent, | cell adhesion |
| | | carbohydrate-recognition domain) lectin, | |
| | | superfamily member 5 | |
| 208892_s_at | 1848 | dual specificity phosphatase 6 | cell death |
| 202644_s_at | 7128 | tumor necrosis factor, alpha-induced | cell death |
| | | protein 3 | |
| 214727_at | 675 | breast cancer 2, early onset | cell death |
| 214467_at | 8477 | G protein-coupled receptor 65 | cell death |
| 205681_at | 597 | BCL2-related protein A1 | cell death |
| 201710_at | 4605 | v-myb myeloblastosis viral oncogene | cell death |
| | | homolog (avian)-like 2 | |
| 204614_at | 5055 | serine (or cysteine) proteinase inhibitor, | cell death |
| | | clade B (ovalbumin), member 2 | |
| 204655_at | 6352 | chemokine (C-C motif) ligand 5 | cell homeostasis |
| 210946_at | 8611 | phosphatidic acid phosphatase type 2A | cell migration |
| 212190_at | 5270 | serine (or cysteine) proteinase inhibitor, | cell migration |
| | | clade E (nexin, plasminogen activator | |
| | | inhibitor type 1), member 2 | |
| 203358_s_at | 2146 | enhancer of zeste homolog 2 | cell organization and biogenesis |
| | | (Drosophila) | |
| 214727_at | 675 | breast cancer 2, early onset | cell organization and biogenesis |
| 201999_s_at | 6993 | t-complex-associated-testis-expressed 1- | cell organization and biogenesis |
| | | like 1 | |
| 205046_at | 1062 | centromere protein E, 312 kDa | cell proliferation |
| 208892_s_at | 1848 | dual specificity phosphatase 6 | cell proliferation |
| 205053_at | 5557 | primase, polypeptide 1, 49 kDa | cell proliferation |
| 203564_at | 2189 | Fanconi anemia, complementation group G | cell proliferation |
| 214727_at | 675 | breast cancer 2, early onset | cell proliferation |
| 209773_s_at | 6241 | ribonucleotide reductase M2 polypeptide | cell proliferation |
| 211506_s_at | 3576 | interleukin 8 | cell proliferation |
| 202811_at | 10617 | associated molecule with the SH3 | cell proliferation |
| | | domain of STAM | |
| 201710_at | 4605 | v-myb myeloblastosis viral oncogene | cell proliferation |
| | | homolog (avian)-like 2 | |
| 200660_at | 6282 | S100 calcium binding protein A11 | cell proliferation |
| | | (calgizzarin) | |
| 202191_s_at | 8522 | growth arrest-specific 7 | cell proliferation |
| 211506_s_at | 3576 | interleukin 8 | cell-cell signaling |
| 209473_at | 953 | ectonucleoside triphosphate | cell-cell signaling |
| | | diphosphohydrolase 1 | |
| 204655_at | 6352 | chemokine (C-C motif) ligand 5 | cell-cell signaling |
| 207339_s_at | 4050 | lymphotoxin beta (TNF superfamily, | cell-cell signaling |
| | | member 3) | |
| 205204_at | 4828 | neuromedin B | cell-cell signaling |
| 218212_s_at | 4338 | molybdenum cofactor synthesis 2 | coenzymes and prosthetic |
| | | | group metabolism |
| 203923_s_at | 1536 | cytochrome b-245, beta polypeptide | electron transport |
| | | (chronic granulomatous disease) | |
| 204446_s_at | 240 | arachidonate 5-lipoxygenase | electron transport |
| 202437_s_at | 1545 | cytochrome P450, family 1, subfamily B, | electron transport |
| | | polypeptide 1 | |
| 202942_at | 2109 | electron-transfer-flavoprotein, beta | electron transport |
| | | polypeptide | |
| 203923_s_at | 1536 | cytochrome b-245, beta polypeptide | energy pathways |
| | | (chronic granulomatous disease) | |
| 210942_s_at | 10402 | alpha2,3-sialyltransferase | lipid metabolism |
| 204446_s_at | 240 | arachidonate 5-lipoxygenase | lipid metabolism |
| 204174_at | 241 | arachidonate 5-lipoxygenase-activating | lipid metabolism |
| | | protein | |
| 201012_at | 301 | annexin A1 | lipid metabolism |
| 210946_at | 8611 | phosphatidic acid phosphatase type 2A | lipid metabolism |
| 201963_at | 2180 | fatty-acid-Coenzyme A ligase, long-chain 2 | lipid metabolism |
| 208771_s_at | 4048 | leukotriene A4 hydrolase | lipid metabolism |
| 207275_s_at | 2179 | fatty-acid-Coenzyme A ligase, long-chain 1 | lipid metabolism |
| 206066_s_at | 5889 | RAD51 homolog C (S. cerevisiae) | nucleobase, nucleoside, nucleotide |
| | | | and nucleic acid metabolism |
| 203358_s_at | 2146 | enhancer of zeste homolog 2 (Drosophila) | nucleobase, nucleoside, nucleotide |
| | | | and nucleic acid metabolism |
| 205053_at | 5557 | primase, polypeptide 1, 49 kDa | nucleobase, nucleoside, nucleotide |
| | | | and nucleic acid metabolism |
| 203564_at | 2189 | Fanconi anemia, complementation group G | nucleobase, nucleoside, nucleotide |
| | | | and nucleic acid metabolism |
| 203409_at | 1643 | damage-specific DNA binding protein 2, | nucleobase, nucleoside, nucleotide |
| | | 48 kDa | and nucleic acid metabolism |
| 214727_at | 675 | breast cancer 2, early onset | nucleobase, nucleoside, nucleotide |
| | | | and nucleic acid metabolism |
| 209773_s_at | 6241 | ribonucleotide reductase M2 polypeptide | nucleobase, nucleoside, nucleotide |
| | | | and nucleic acid metabolism |
| 206111_at | 6036 | ribonuclease, RNase A family, 2 (liver, | nucleobase, nucleoside, nucleotide |
| | | eosinophil-derived neurotoxin) | and nucleic acid metabolism |
| 201710_at | 4605 | v-myb myeloblastosis viral oncogene | nucleobase, nucleoside, nucleotide |
| | | homolog (avian)-like 2 | and nucleic acid metabolism |
| 200660_at | 6282 | S100 calcium binding protein A11 | nucleobase, nucleoside, nucleotide |
| | | (calgizzarin) | and nucleic acid metabolism |
| 202532_s_at | 1719 | dihydrofolate reductase | nucleobase, nucleoside, nucleotide |
| | | | and nucleic acid metabolism |

### Programmed Cell Death

| | LOCUS | | |
|---|---|---|---|
| AFFX_ID | LINK | GENE NAME | CLASSIFICATION |
| 210942_s_at | 10402 | alpha2,3-sialyltransferase | amine metabolism |
| 202532_s_at | 1719 | dihydrofolate reductase | amine metabolism |
| 202532_s_at | 1719 | dihydrofolate reductase | amino acid and derivative |
| | | | metabolism |
| 218212_s_at | 4338 | molybdenum cofactor synthesis 2 | aromatic compound metabolism |
| 210942_s_at | 10402 | alpha2,3-sialyltransferase | biosynthesis |
| 218212_s_at | 4338 | molybdenum cofactor synthesis 2 | biosynthesis |
| 207563_s_at | 8473 | O-linked N-acetylglucosamine (GlcNAc) | biosynthesis |
| | | transferase (UDP-N- | |
| | | acetylglucosamine:polypeptide-N- | |
| | | acetylglucosaminyl transferase) | |
| 200962_at | 6160 | ribosomal protein L31 | biosynthesis |
| 204446_s_at | 240 | arachidonate 5-lipoxygenase | biosynthesis |
| 204174_at | 241 | arachidonate 5-lipoxygenase-activating | biosynthesis |
| | | protein | |
| 202532_s_at | 1719 | dihydrofolate reductase | biosynthesis |
| 208771_s_at | 4048 | leukotriene A4 hydrolase | biosynthesis |
| 210845_s_at | 5329 | plasminogen activator, urokinase | blood coagulation |
| | | receptor | |
| 209473_at | 953 | ectonucleoside triphosphate | blood coagulation |
| | | diphosphohydrolase 1 | |
| 210942_s_at | 10402 | alpha2,3-sialyltransferase | carbohydrate metabolism |
| 202499_s_at | 6515 | solute carrier family 2 (facilitated glucose | carbohydrate metabolism |
| | | transporter), member 3 | |
| 219373_at | 54344 | dolichyl-phosphate mannosyltransferase | carbohydrate metabolism |
| | | polypeptide 3 | |
| 206111_at | 6036 | ribonuclease, RNase A family, 2 (liver, | catabolism |
| | | eosinophil-derived neurotoxin) | |
| 201069_at | 4313 | matrix metalloproteinase 2 (gelatinase A, | catabolism |
| | | 72 kDa gelatinase, 72 kDa type IV | |
| | | collagenase) | |
| 208771_s_at | 4048 | leukotriene A4 hydrolase | catabolism |
| 212190_at | 5270 | serine (or cysteine) proteinase inhibitor, | catabolism |
| | | clade E (nexin, plasminogen activator | |
| | | inhibitor type 1), member 2 | |
| 211506_s_at | 3576 | interleukin 8 | cell adhesion |
| 209473_at | 953 | ectonucleoside triphosphate | cell adhesion |
| | | diphosphohydrolase 1 | |
| 204655_at | 6352 | chemokine (C-C motif) ligand 5 | cell adhesion |
| 205176_s_at | 23421 | integrin beta 3 binding protein (beta3- | cell adhesion |
| | | endonexin) | |
| 216250_s_at | 9404 | leupaxin | cell adhesion |
| 219890_at | 23601 | C-type (calcium dependent, | cell adhesion |
| | | carbohydrate-recognition domain) lectin, | |
| | | superfamily member 5 | |
| 208892_s_at | 1848 | dual specificity phosphatase 6 | cell death |
| 202644_s_at | 7128 | tumor necrosis factor, alpha-induced | cell death |
| | | protein 3 | |
| 214727_at | 675 | breast cancer 2, early onset | cell death |
| 214467_at | 8477 | G protein-coupled receptor 65 | cell death |
| 205681_at | 597 | BCL2-related protein A1 | cell death |
| 201710_at | 4605 | v-myb myeloblastosis viral oncogene | cell death |
| | | homolog (avian)-like 2 | |
| 204614_at | 5055 | serine (or cysteine) proteinase inhibitor, | cell death |
| | | clade B (ovalbumin), member 2 | |
| 204655_at | 6352 | chemokine (C-C motif) ligand 5 | cell homeostasis |
| 210946_at | 8611 | phosphatidic acid phosphatase type 2A | cell migration |
| 212190_at | 5270 | serine (or cysteine) proteinase inhibitor, | cell migration |
| | | clade E (nexin, plasminogen activator | |
| | | inhibitor type 1), member 2 | |
| 203358_s_at | 2146 | enhancer of zeste homolog 2 | cell organization and biogenesis |
| | | (Drosophila) | |
| 214727_at | 675 | breast cancer 2, early onset | cell organization and biogenesis |
| 201999_s_at | 6993 | t-complex-associated-testis-expressed 1- | cell organization and biogenesis |
| | | like 1 | |
| 205046_at | 1062 | centromere protein E, 312 kDa | cell proliferation |
| 208892_s_at | 1848 | dual specificity phosphatase 6 | cell proliferation |
| 205053_at | 5557 | primase, polypeptide 1, 49 kDa | cell proliferation |
| 203564_at | 2189 | Fanconi anemia, complementation group G | cell proliferation |
| 214727_at | 675 | breast cancer 2, early onset | cell proliferation |
| 209773_s_at | 6241 | ribonucleotide reductase M2 polypeptide | cell proliferation |
| 211506_s_at | 3576 | interleukin 8 | cell proliferation |
| 202811_at | 10617 | associated molecule with the SH3 | cell proliferation |
| | | domain of STAM | |
| 201710_at | 4605 | v-myb myeloblastosis viral oncogene | cell proliferation |
| | | homolog (avian)-like 2 | |
| 200660_at | 6282 | S100 calcium binding protein A11 | cell proliferation |
| | | (calgizzarin) | |
| 202191_s_at | 8522 | growth arrest-specific 7 | cell proliferation |
| 211506_s_at | 3576 | interleukin 8 | cell-cell signaling |
| 209473_at | 953 | ectonucleoside triphosphate | cell-cell signaling |
| | | diphosphohydrolase 1 | |
| 204655_at | 6352 | chemokine (C-C motif) ligand 5 | cell-cell signaling |
| 207339_s_at | 4050 | lymphotoxin beta (TNF superfamily, | cell-cell signaling |
| | | member 3) | |
| 205204_at | 4828 | neuromedin B | cell-cell signaling |
| 218212_s_at | 4338 | molybdenum cofactor synthesis 2 | coenzymes and prosthetic |
| | | | group metabolism |
| 203923_s_at | 1536 | cytochrome b-245, beta polypeptide | electron transport |
| | | (chronic granulomatous disease) | |
| 204446_s_at | 240 | arachidonate 5-lipoxygenase | electron transport |
| 202437_s_at | 1545 | cytochrome P450, family 1, subfamily B, | electron transport |
| | | polypeptide 1 | |
| 202942_at | 2109 | electron-transfer-flavoprotein, beta | electron transport |
| | | polypeptide | |
| 203923_s_at | 1536 | cytochrome b-245, beta polypeptide | energy pathways |
| | | (chronic granulomatous disease) | |
| 210942_s_at | 10402 | alpha2,3-sialyltransferase | lipid metabolism |
| 204446_s_at | 240 | arachidonate 5-lipoxygenase | lipid metabolism |
| 204174_at | 241 | arachidonate 5-lipoxygenase-activating | lipid metabolism |
| | | protein | |
| 201012_at | 301 | annexin A1 | lipid metabolism |
| 210946_at | 8611 | phosphatidic acid phosphatase type 2A | lipid metabolism |
| 201963_at | 2180 | fatty-acid-Coenzyme A ligase, long-chain 2 | lipid metabolism |
| 208771_s_at | 4048 | leukotriene A4 hydrolase | lipid metabolism |
| 207275_s_at | 2179 | fatty-acid-Coenzyme A ligase, long-chain 1 | lipid metabolism |
| 206066_s_at | 5889 | RAD51 homolog C (S. cerevisiae) | nucleobase, nucleoside, |
| | | | nucleotide and nucleic acid |
| | | | metabolism |
| 203358_s_at | 2146 | enhancer of zeste homolog 2 | nucleobase, nucleoside, |
| | | (Drosophila) | nucleotide and nucleic acid |
| | | | metabolism |
| 205053_at | 5557 | primase, polypeptide 1, 49 kDa | nucleobase, nucleoside, |
| | | | nucleotide and nucleic acid |
| | | | metabolism |
| 203564_at | 2189 | Fanconi anemia, complementation group G | nucleobase, nucleoside, |
| | | | nucleotide and nucleic acid |
| | | | metabolism |
| 203409_at | 1643 | damage-specific DNA binding protein 2, | nucleobase, nucleoside, |
| | | 48 kDa | nucleotide and nucleic acid |
| | | | metabolism |
| 214727_at | 675 | breast cancer 2, early onset | nucleobase, nucleoside, |
| | | | nucleotide and nucleic acid |
| | | | metabolism |
| 209773_s_at | 6241 | ribonucleotide reductase M2 polypeptide | nucleobase, nucleoside, |
| | | | nucleotide and nucleic acid |
| | | | metabolism |
| 206111_at | 6036 | ribonuclease, RNase A family, 2 (liver, | nucleobase, nucleoside, |
| | | eosinophil-derived neurotoxin) | nucleotide and nucleic acid |
| | | | metabolism |
| 201710_at | 4605 | v-myb myeloblastosis viral oncogene | nucleobase, nucleoside, |
| | | homolog (avian)-like 2 | nucleotide and nucleic acid |
| | | | metabolism |
| 200660_at | 6282 | S100 calcium binding protein A11 | nucleobase, nucleoside, |
| | | (calgizzarin) | nucleotide and nucleic acid |
| | | | metabolism |
| 202532_s_at | 1719 | dihydrofolate reductase | nucleobase, nucleoside, |
| | | | nucleotide and nucleic acid |
| | | | metabolism |
| 202532_s_at | 1719 | dihydrofolate reductase | one-carbon compound |
| | | | metabolism |
| 204446_s_at | 240 | arachidonate 5-lipoxygenase | organic acid metabolism |
| 204174_at | 241 | arachidonate 5-lipoxygenase-activating | organic acid metabolism |
| | | protein | |
| 202532_s_at | 1719 | dihydrofolate reductase | organic acid metabolism |
| 201963_at | 2180 | fatty-acid-Coenzyme A ligase, long-chain 2 | organic acid metabolism |
| 208771_s_at | 4048 | leukotriene A4 hydrolase | organic acid metabolism |
| 207275_s_at | 2179 | fatty-acid-Coenzyme A ligase, long-chain 1 | organic acid metabolism |
| 206734_at | 8690 | jerky homolog-like (mouse) | organogenesis |
| 211506_s_at | 3576 | interleukin 8 | organogenesis |
| 205807_s_at | 7286 | tuftelin 1 | organogenesis |
| 202191_s_at | 8522 | growth arrest-specific 7 | organogenesis |
| 218224_at | 9240 | paraneoplastic antigen MA1 | organogenesis |
| 202437_s_at | 1545 | cytochrome P450, family 1, subfamily B, | organogenesis |
| | | polypeptide 1 | |
| 201908_at | 1857 | dishevelled, dsh homolog 3 (Drosophila) | organogenesis |
| 202554_s_at | 2947 | glutathione S-transferase M3 (brain) | organogenesis |
| 205807_s_at | 7286 | tuftelin 1 | ossification |
| 204655_at | 6352 | chemokine (C-C motif) ligand 5 | oxygen and reactive oxygen |
| | | | species metabolism |
| 202554_s_at | 2947 | glutathione S-transferase M3 (brain) | oxygen and reactive oxygen |
| | | | species metabolism |
| 202437_s_at | 1545 | cytochrome P450, family 1, subfamily B, | perception of external stimulus |
| | | polypeptide 1 | |
| 208892_s_at | 1848 | dual specificity phosphatase 6 | phosphorus metabolism |
| 209457_at | 1847 | dual specificity phosphatase 5 | phosphorus metabolism |
| 221563_at | 11221 | dual specificity phosphatase 10 | phosphorus metabolism |
| 205260_s_at | 97 | acylphosphatase 1, erythrocyte | phosphorus metabolism |
| | | (common) type | |
| 221840_at | 5791 | protein tyrosine phosphatase, receptor | phosphorus metabolism |
| | | type, E | |
| 208892_s_at | 1848 | dual specificity phosphatase 6 | programmed cell death |
| 202644_s_at | 7128 | tumor necrosis factor, alpha-induced protein 3 | programmed cell death |
| 214727_at | 675 | breast cancer 2, early onset | programmed cell death |
| 214467_at | 8477 | G protein-coupled receptor 65 | programmed cell death |
| 205681_at | 597 | BCL2-related protein A1 | programmed cell death |
| 201710_at | 4605 | v-myb myeloblastosis viral oncogene | programmed cell death |
| | | homolog (avian)-like 2 | |
| 204614_at | 5055 | serine (or cysteine) proteinase inhibitor, clade | programmed cell death |
| | | B (ovalbumin), member 2 | |

### Lipid Metabolism

| | LOCUS | | |
|---|---|---|---|
| AFFX_ID | LINK | GENE NAME | CLASSIFICATION |
| 210942_s_at | 10402 | alpha2,3-sialyltransferase | amine metabolism |
| 202532_s_at | 1719 | dihydrofolate reductase | amine metabolism |
| 202532_s_at | 1719 | dihydrofolate reductase | amino acid and derivative |
| | | | metabolism |
| 218212_s_at | 4338 | molybdenum cofactor synthesis 2 | aromatic compound metabolism |
| 210942_s_at | 10402 | alpha2,3-sialyltransferase | biosynthesis |
| 218212_s_at | 4338 | molybdenum cofactor synthesis 2 | biosynthesis |
| 207563_s_at | 8473 | O-linked N-acetylglucosamine (GlcNAc) | biosynthesis |
| | | transferase (UDP-N- | |
| | | acetylglucosamine:polypeptide-N- | |
| | | acetylglucosaminyl transferase) | |
| 200962_at | 6160 | ribosomal protein L31 | biosynthesis |
| 204446_s_at | 240 | arachidonate 5-lipoxygenase | biosynthesis |
| 204174_at | 241 | arachidonate 5-lipoxygenase-activating | biosynthesis |
| | | protein | |
| 202532_s_at | 1719 | dihydrofolate reductase | biosynthesis |
| 208771_s_at | 4048 | leukotriene A4 hydrolase | biosynthesis |
| 210845_s_at | 5329 | plasminogen activator, urokinase | blood coagulation |
| | | receptor | |
| 209473_at | 953 | ectonucleoside triphosphate | blood coagulation |
| | | diphosphohydrolase 1 | |
| 210942_s_at | 10402 | alpha2,3-sialyltransferase | carbohydrate metabolism |
| 202499_s_at | 6515 | solute carrier family 2 (facilitated glucose | carbohydrate metabolism |
| | | transporter), member 3 | |
| 219373_at | 54344 | dolichyl-phosphate mannosyltransferase | carbohydrate metabolism |
| | | polypeptide 3 | |
| 206111_at | 6036 | ribonuclease, RNase A family, 2 (liver, | catabolism |
| | | eosinophil-derived neurotoxin) | |
| 201069_at | 4313 | matrix metalloproteinase 2 (gelatinase A, | catabolism |
| | | 72 kDa gelatinase, 72 kDa type IV | |
| | | collagenase) | |
| 208771_s_at | 4048 | leukotriene A4 hydrolase | catabolism |
| 212190_at | 5270 | serine (or cysteine) proteinase inhibitor, | catabolism |
| | | clade E (nexin, plasminogen activator | |
| | | inhibitor type 1), member 2 | |
| 211506_s_at | 3576 | interleukin 8 | cell adhesion |
| 209473_at | 953 | ectonucleoside triphosphate | cell adhesion |
| | | diphosphohydrolase 1 | |
| 204655_at | 6352 | chemokine (C-C motif) ligand 5 | cell adhesion |
| 205176_s_at | 23421 | integrin beta 3 binding protein (beta3- | cell adhesion |
| | | endonexin) | |
| 216250_s_at | 9404 | leupaxin | cell adhesion |
| 219890_at | 23601 | C-type (calcium dependent, | cell adhesion |
| | | carbohydrate-recognition domain) lectin, | |
| | | superfamily member 5 | |
| 208892_s_at | 1848 | dual specificity phosphatase 6 | cell death |
| 202644_s_at | 7128 | tumor necrosis factor, alpha-induced | cell death |
| | | protein 3 | |
| 214727_at | 675 | breast cancer 2, early onset | cell death |
| 214467_at | 8477 | G protein-coupled receptor 65 | cell death |
| 205681_at | 597 | BCL2-related protein A1 | cell death |
| 201710_at | 4605 | v-myb myeloblastosis viral oncogene | cell death |
| | | homolog (avian)-like 2 | |
| 204614_at | 5055 | serine (or cysteine) proteinase inhibitor, | cell death |
| | | clade B (ovalbumin), member 2 | |
| 204655_at | 6352 | chemokine (C-C motif) ligand 5 | cell homeostasis |
| 210946_at | 8611 | phosphatidic acid phosphatase type 2A | cell migration |
| 212190_at | 5270 | serine (or cysteine) proteinase inhibitor, | cell migration |
| | | clade E (nexin, plasminogen activator | |
| | | inhibitor type 1), member 2 | |
| 203358_s_at | 2146 | enhancer of zeste homolog 2 | cell organization and biogenesis |
| | | (Drosophila) | |
| 214727_at | 675 | breast cancer 2, early onset | cell organization and biogenesis |
| 201999_s_at | 6993 | t-complex-associated-testis-expressed 1- | cell organization and biogenesis |
| | | like 1 | |
| 205046_at | 1062 | centromere protein E, 312 kDa | cell proliferation |
| 208892_s_at | 1848 | dual specificity phosphatase 6 | cell proliferation |
| 205053_at | 5557 | primase, polypeptide 1, 49 kDa | cell proliferation |
| 203564_at | 2189 | Fanconi anemia, complementation group G | cell proliferation |
| 214727_at | 675 | breast cancer 2, early onset | cell proliferation |
| 209773_s_at | 6241 | ribonucleotide reductase M2 polypeptide | cell proliferation |
| 211506_s_at | 3576 | interleukin 8 | cell proliferation |
| 202811_at | 10617 | associated molecule with the SH3 | cell proliferation |
| | | domain of STAM | |
| 201710_at | 4605 | v-myb myeloblastosis viral oncogene | cell proliferation |
| | | homolog (avian)-like 2 | |
| 200660_at | 6282 | S100 calcium binding protein A11 | cell proliferation |
| | | (calgizzarin) | |
| 202191_s_at | 8522 | growth arrest-specific 7 | cell proliferation |
| 211506_s_at | 3576 | interleukin 8 | cell-cell signaling |
| 209473_at | 953 | ectonucleoside triphosphate | cell-cell signaling |
| | | diphosphohydrolase 1 | |
| 204655_at | 6352 | chemokine (C-C motif) ligand 5 | cell-cell signaling |
| 207339_s_at | 4050 | lymphotoxin beta (TNF superfamily, | cell-cell signaling |
| | | member 3) | |
| 205204_at | 4828 | neuromedin B | cell-cell signaling |
| 218212_s_at | 4338 | molybdenum cofactor synthesis 2 | coenzymes and prosthetic |
| | | | group metabolism |
| 203923_s_at | 1536 | cytochrome b-245, beta polypeptide | electron transport |
| | | (chronic granulomatous disease) | |
| 204446_s_at | 240 | arachidonate 5-lipoxygenase | electron transport |
| 202437_s_at | 1545 | cytochrome P450, family 1, subfamily B, | electron transport |
| | | polypeptide 1 | |
| 202942_at | 2109 | electron-transfer-flavoprotein, beta | electron transport |
| | | polypeptide | |
| 203923_s_at | 1536 | cytochrome b-245, beta polypeptide | energy pathways |
| | | (chronic granulomatous disease) | |
| 210942_s_at | 10402 | alpha2,3-sialyltransferase | lipid metabolism |
| 204446_s_at | 240 | arachidonate 5-lipoxygenase | lipid metabolism |
| 204174_at | 241 | arachidonate 5-lipoxygenase-activating | lipid metabolism |
| | | protein | |
| 201012_at | 301 | annexin A1 | lipid metabolism |
| 210946_at | 8611 | phosphatidic acid phosphatase type 2A | lipid metabolism |
| 201963_at | 2180 | fatty-acid-Coenzyme A ligase, long-chain 2 | lipid metabolism |
| 208771_s_at | 4048 | leukotriene A4 hydrolase | lipid metabolism |
| 207275_s_at | 2179 | fatty-acid-Coenzyme A ligase, long-chain 1 | lipid metabolism |

MPA (Early) vs. MPA (Late): 66 genes were binned into this category. These genes were further binned into the following functional categories.

### Nucleotide Metabolism

| | LOCUS | | |
|---|---|---|---|
| AFFX_ID | LINK | GENE NAME | CLASSIFICATION |
| 201612_at | 223 | aldehyde dehydrogenase 9 family, | aldehyde metabolism |
| | | member A1 | |
| 210942_s_at | 10402 | alpha2,3-sialyltransferase | amine metabolism |
| 206643_at | 3034 | histidine ammonia-lyase | amine metabolism |
| 206643_at | 3034 | histidine ammonia-lyase | amino acid and derivative |
| | | | metabolism |
| 210942_s_at | 10402 | alpha2,3-sialyltransferase | biosynthesis |
| 219649_at | 29929 | dolichyl-P-Glc:Man9GlcNAc2-PP- | biosynthesis |
| | | dolichylglucosyltransferase | |
| 200962_at | 6160 | ribosomal protein L31 | biosynthesis |
| 206643_at | 3034 | histidine ammonia-lyase | biosynthesis |
| 204446_s_at | 240 | arachidonate 5-lipoxygenase | biosynthesis |
| 204174_at | 241 | arachidonate 5-lipoxygenase- | biosynthesis |
| | | activating protein | |
| 208771_s_at | 4048 | leukotriene A4 hydrolase | biosynthesis |
| 210942_s_at | 10402 | alpha2,3-sialyltransferase | carbohydrate metabolism |
| 202499_s_at | 6515 | solute carrier family 2 (facilitated | carbohydrate metabolism |
| | | glucose transporter), member 3 | |
| 206643_at | 3034 | histidine ammonia-lyase | catabolism |
| 202551_s_at | 51232 | cysteine-rich motor neuron 1 | catabolism |
| 208771_s_at | 4048 | leukotriene A4 hydrolase | catabolism |
| 212190_at | 5270 | serine (or cysteine) proteinase | catabolism |
| | | inhibitor, clade E (nexin, | |
| | | plasminogen activator inhibitor type | |
| | | 1), member 2 | |
| 211506_s_at | 3576 | interleukin 8 | cell adhesion |
| 207113_s_at | 7124 | tumor necrosis factor (TNF | cell adhesion |
| | | superfamily, member 2) | |
| 201105_at | 3956 | lectin, galactoside-binding, soluble, 1 | cell adhesion |
| | | (galectin 1) | |
| 216250_s_at | 9404 | leupaxin | cell adhesion |
| 219890_at | 23601 | C-type (calcium dependent, | cell adhesion |
| | | carbohydrate-recognition domain) | |
| | | lectin, superfamily member 5 | |
| 214727_at | 675 | breast cancer 2, early onset | cell death |
| 207113_s_at | 7124 | tumor necrosis factor (TNF | cell death |
| | | superfamily, member 2) | |
| 204614_at | 5055 | serine (or cysteine) proteinase | cell death |
| | | inhibitor, clade B (ovalbumin), | |
| | | member 2 | |
| 201105_at | 3956 | lectin, galactoside-binding, soluble, 1 | cell death |
| | | (galectin 1) | |
| 202551_s_at | 51232 | cysteine-rich motor neuron 1 | cell growth |
| 212190_at | 5270 | serine (or cysteine) proteinase | cell migration |
| | | inhibitor, clade E (nexin, | |
| | | plasminogen activator inhibitor type | |
| | | 1), member 2 | |
| 214727_at | 675 | breast cancer 2, early onset | cell organization and biogenesis |
| 201999_s_at | 6993 | t-complex-associated-testis- | cell organization and biogenesis |
| | | expressed 1-like 1 | |
| 204603_at | 9156 | exonuclease 1 | cell proliferation |
| 205053_at | 5557 | primase, polypeptide 1, 49 kDa | cell proliferation |
| 214727_at | 675 | breast cancer 2, early onset | cell proliferation |
| 209773_s_at | 6241 | ribonucleotide reductase M2 | cell proliferation |
| | | polypeptide | |
| 211506_s_at | 3576 | interleukin 8 | cell proliferation |
| 200660_at | 6282 | S100 calcium binding protein A11 | cell proliferation |
| | | (calgizzarin) | |
| 202769_at | 901 | cyclin G2 | cell proliferation |
| 201700_at | 896 | cyclin D3 | cell proliferation |
| 211506_s_at | 3576 | interleukin 8 | cell-cell signaling |
| 207113_s_at | 7124 | tumor necrosis factor (TNF | cell-cell signaling |
| | | superfamily, member 2) | |
| 203923_s_at | 1536 | cytochrome b-245, beta polypeptide | electron transport |
| | | (chronic granulomatous disease) | |
| 204446_s_at | 240 | arachidonate 5-lipoxygenase | electron transport |
| 202437_s_at | 1545 | cytochrome P450, family 1, | electron transport |
| | | subfamily B, polypeptide 1 | |
| 203923_s_at | 1536 | cytochrome b-245, beta polypeptide | energy pathways |
| | | (chronic granulomatous disease) | |
| 210942_s_at | 10402 | alpha2,3-sialyltransferase | lipid metabolism |
| 204446_s_at | 240 | arachidonate 5-lipoxygenase | lipid metabolism |
| 204174_at | 241 | arachidonate 5-lipoxygenase- | lipid metabolism |
| | | activating protein | |
| 201963_at | 2180 | fatty-acid-Coenzyme A ligase, long- | lipid metabolism |
| | | chain 2 | |
| 208771_s_at | 4048 | leukotriene A4 hydrolase | lipid metabolism |
| 207275_s_at | 2179 | fatty-acid-Coenzyme A ligase, long- | lipid metabolism |
| | | chain 1 | |
| 209906_at | 719 | complement component 3a receptor 1 | muscle contraction |
| 204603_at | 9156 | exonuclease 1 | nucleobase, nucleoside, nucleotide |
| | | | and nucleic acid metabolism |
| 202338_at | 7083 | thymidine kinase 1, soluble | nucleobase, nucleoside, nucleotide |
| | | | and nucleic acid metabolism |
| 218384_at | 23589 | calcium regulated heat stable protein 1, | nucleobase, nucleoside, nucleotide |
| | | 24 kDa | and nucleic acid metabolism |
| 205053_at | 5557 | primase, polypeptide 1, 49 kDa | nucleobase, nucleoside, nucleotide |
| | | | and nucleic acid metabolism |
| 203409_at | 1643 | damage-specific DNA binding protein 2, | nucleobase, nucleoside, nucleotide |
| | | 48 kDa | and nucleic acid metabolism |
| 214727_at | 675 | breast cancer 2, early onset | nucleobase, nucleoside, nucleotide |
| | | | and nucleic acid metabolism |
| 209773_s_at | 6241 | ribonucleotide reductase M2 polypeptide | nucleobase, nucleoside, nucleotide |
| | | | and nucleic acid metabolism |
| 207113_s_at | 7124 | tumor necrosis factor (TNF superfamily, | nucleobase, nucleoside, nucleotide |
| | | member 2) | and nucleic acid metabolism |
| 200660_at | 6282 | S100 calcium binding protein A11 | nucleobase, nucleoside, nucleotide |
| | | (calgizzarin) | and nucleic acid metabolism |
| 209930_s_at | 4778 | nuclear factor (erythroid-derived 2), | nucleobase, nucleoside, nucleotide |
| | | 45 kDa | and nucleic acid metabolism |
| 201989_s_at | 1389 | cAMP responsive element binding | nucleobase, nucleoside, nucleotide |
| | | protein-like 2 | and nucleic acid metabolism |

### Response to Biotic Stimuli

| | LOCUS | | |
|---|---|---|---|
| AFFX_ID | LINK | GENE NAME | CLASSIFICATION |
| 201612_at | 223 | aldehyde dehydrogenase 9 family, | aldehyde metabolism |
| | | member A1 | |
| 210942_s_at | 10402 | alpha2,3-sialyltransferase | amine metabolism |
| 206643_at | 3034 | histidine ammonia-lyase | amine metabolism |
| 206643_at | 3034 | histidine ammonia-lyase | amino acid and derivative |
| | | | metabolism |
| 210942_s_at | 10402 | alpha2,3-sialyltransferase | biosynthesis |
| 219649_at | 29929 | dolichyl-P-Glc:Man9GlcNAc2-PP- | biosynthesis |
| | | dolichylglucosyltransferase | |
| 200962_at | 6160 | ribosomal protein L31 | biosynthesis |
| 206643_at | 3034 | histidine ammonia-lyase | biosynthesis |
| 204446_s_at | 240 | arachidonate 5-lipoxygenase | biosynthesis |
| 204174_at | 241 | arachidonate 5-lipoxygenase-activating | biosynthesis |
| | | protein | |
| 208771_s_at | 4048 | leukotriene A4 hydrolase | biosynthesis |
| 210942_s_at | 10402 | alpha2,3-sialyltransferase | carbohydrate metabolism |
| 202499_s_at | 6515 | solute carrier family 2 (facilitated | carbohydrate metabolism |
| | | glucose transporter), member 3 | |
| 206643_at | 3034 | histidine ammonia-lyase | catabolism |
| 202551_s_at | 51232 | cysteine-rich motor neuron 1 | catabolism |
| 208771_s_at | 4048 | leukotriene A4 hydrolase | catabolism |
| 212190_at | 5270 | serine (or cysteine) proteinase inhibitor, | catabolism |
| | | clade E (nexin, plasminogen activator | |
| | | inhibitor type 1), member 2 | |
| 211506_s_at | 3576 | interleukin 8 | cell adhesion |
| 207113_s_at | 7124 | tumor necrosis factor (TNF superfamily, | cell adhesion |
| | | member 2) | |
| 201105_at | 3956 | lectin, galactoside-binding, soluble, 1 | cell adhesion |
| | | (galectin 1) | |
| 216250_s_at | 9404 | leupaxin | cell adhesion |
| 219890_at | 23601 | C-type (calcium dependent, | cell adhesion |
| | | carbohydrate-recognition domain) | |
| | | lectin, superfamily member 5 | |
| 214727_at | 675 | breast cancer 2, early onset | cell death |
| 207113_s_at | 7124 | tumor necrosis factor (TNF superfamily, | cell death |
| | | member 2) | |
| 204614_at | 5055 | serine (or cysteine) proteinase inhibitor, | cell death |
| | | clade B (ovalbumin), member 2 | |
| 201105_at | 3956 | lectin, galactoside-binding, soluble, 1 | cell death |
| | | (galectin 1) | |
| 202551_s_at | 51232 | cysteine-rich motor neuron 1 | cell growth |
| 212190_at | 5270 | serine (or cysteine) proteinase inhibitor, | cell migration |
| | | clade E (nexin, plasminogen activator | |
| | | inhibitor type 1), member 2 | |
| 214727_at | 675 | breast cancer 2, early onset | cell organization and biogenesis |
| 201999_s_at | 6993 | t-complex-associated-testis-expressed | cell organization and biogenesis |
| | | 1-like 1 | |
| 204603_at | 9156 | exonuclease 1 | cell proliferation |
| 205053_at | 5557 | primase, polypeptide 1, 49 kDa | cell proliferation |
| 214727_at | 675 | breast cancer 2, early onset | cell proliferation |
| 209773_s_at | 6241 | ribonucleotide reductase M2 | cell proliferation |
| | | polypeptide | |
| 211506_s_at | 3576 | interleukin 8 | cell proliferation |
| 200660_at | 6282 | S100 calcium binding protein A11 | cell proliferation |
| | | (calgizzarin) | |
| 202769_at | 901 | cyclin G2 | cell proliferation |
| 201700_at | 896 | cyclin D3 | cell proliferation |
| 211506_s_at | 3576 | interleukin 8 | cell-cell signaling |
| 207113_s_at | 7124 | tumor necrosis factor (TNF superfamily, | cell-cell signaling |
| | | member 2) | |
| 203923_s_at | 1536 | cytochrome b-245, beta polypeptide | electron transport |
| | | (chronic granulomatous disease) | |
| 204446_s_at | 240 | arachidonate 5-lipoxygenase | electron transport |
| 202437_s_at | 1545 | cytochrome P450, family 1, subfamily | electron transport |
| | | B, polypeptide 1 | |
| 203923_s_at | 1536 | cytochrome b-245, beta polypeptide | energy pathways |
| | | (chronic granulomatous disease) | |
| 210942_s_at | 10402 | alpha2,3-sialyltransferase | lipid metabolism |
| 204446_s_at | 240 | arachidonate 5-lipoxygenase | lipid metabolism |
| 204174_at | 241 | arachidonate 5-lipoxygenase-activating | lipid metabolism |
| | | protein | |
| 201963_at | 2180 | fatty-acid-Coenzyme A ligase, long- | lipid metabolism |
| | | chain 2 | |
| 208771_s_at | 4048 | leukotriene A4 hydrolase | lipid metabolism |
| 207275_s_at | 2179 | fatty-acid-Coenzyme A ligase, long- | lipid metabolism |
| | | chain 1 | |
| 209906_at | 719 | complement component 3a receptor 1 | muscle contraction |
| 204603_at | 9156 | exonuclease 1 | nucleobase, nucleoside, |
| | | | nucleotide and nucleic acid |
| | | | metabolism |
| 202338_at | 7083 | thymidine kinase 1, soluble | nucleobase, nucleoside, |
| | | | nucleotide and nucleic acid |
| | | | metabolism |
| 218384_at | 23589 | calcium regulated heat stable protein 1, | nucleobase, nucleoside, |
| | | 24 kDa | nucleotide and nucleic acid |
| | | | metabolism |
| 205053_at | 5557 | primase, polypeptide 1, 49 kDa | nucleobase, nucleoside, |
| | | | nucleotide and nucleic acid |
| | | | metabolism |
| 203409_at | 1643 | damage-specific DNA binding protein | nucleobase, nucleoside, |
| | | 2, 48 kDa | nucleotide and nucleic acid |
| | | | metabolism |
| 214727_at | 675 | breast cancer 2, early onset | nucleobase, nucleoside, |
| | | | nucleotide and nucleic acid |
| | | | metabolism |
| 209773_s_at | 6241 | ribonucleotide reductase M2 | nucleobase, nucleoside, |
| | | polypeptide | nucleotide and nucleic acid |
| | | | metabolism |
| 207113_s_at | 7124 | tumor necrosis factor (TNF superfamily, | nucleobase, nucleoside, |
| | | member 2) | nucleotide and nucleic acid |
| | | | metabolism |
| 200660_at | 6282 | S100 calcium binding protein A11 | nucleobase, nucleoside, |
| | | (calgizzarin) | nucleotide and nucleic acid |
| | | | metabolism |
| 209930_s_at | 4778 | nuclear factor (erythroid-derived 2), | nucleobase, nucleoside, |
| | | 45 kDa | nucleotide and nucleic acid |
| | | | metabolism |
| 201989_s_at | 1389 | cAMP responsive element binding | nucleobase, nucleoside, |
| | | protein-like 2 | nucleotide and nucleic acid |
| | | | metabolism |
| 209301_at | 760 | carbonic anhydrase II | one-carbon compound |
| | | | metabolism |
| 206643_at | 3034 | histidine ammonia-lyase | organic acid metabolism |
| 204446_s_at | 240 | arachidonate 5-lipoxygenase | organic acid metabolism |
| 204174_at | 241 | arachidonate 5-lipoxygenase-activating | organic acid metabolism |
| | | protein | |
| 201963_at | 2180 | fatty-acid-Coenzyme A ligase, long- | organic acid metabolism |
| | | chain 2 | |
| 208771_s_at | 4048 | leukotriene A4 hydrolase | organic acid metabolism |
| 207275_s_at | 2179 | fatty-acid-Coenzyme A ligase, long- | organic acid metabolism |
| | | chain 1 | |
| 211506_s_at | 3576 | interleukin 8 | organogenesis |
| 205807_s_at | 7286 | tuftelin 1 | organogenesis |
| 218224_at | 9240 | paraneoplastic antigen MA1 | organogenesis |
| 202551_s_at | 51232 | cysteine-rich motor neuron 1 | organogenesis |
| 202437_s_at | 1545 | cytochrome P450, family 1, subfamily | organogenesis |
| | | B, polypeptide 1 | |
| 205807_s_at | 7286 | tuftelin 1 | ossification |
| 202437_s_at | 1545 | cytochrome P450, family 1, subfamily | perception of external stimulus |
| | | B, polypeptide 1 | |
| 209457_at | 1847 | dual specificity phosphatase 5 | phosphorus metabolism |
| 214727_at | 675 | breast cancer 2, early onset | programmed cell death |
| 207113_s_at | 7124 | tumor necrosis factor (TNF superfamily, | programmed cell death |
| | | member 2) | |
| 204614_at | 5055 | serine (or cysteine) proteinase inhibitor, | programmed cell death |
| | | clade B (ovalbumin), member 2 | |
| 201105_at | 3956 | lectin, galactoside-binding, soluble, 1 | programmed cell death |
| | | (galectin 1) | |
| 209457_at | 1847 | dual specificity phosphatase 5 | protein metabolism |
| 210942_s_at | 10402 | alpha2,3-sialyltransferase | protein metabolism |
| 219649_at | 29929 | dolichyl-P-Glc:Man9GlcNAc2-PP- | protein metabolism |
| | | dolichylglucosyltransferase | |
| 200962_at | 6160 | ribosomal protein L31 | protein metabolism |
| 216250_s_at | 9404 | leupaxin | protein metabolism |
| 202551_s_at | 51232 | cysteine-rich motor neuron 1 | protein metabolism |
| 208771_s_at | 4048 | leukotriene A4 hydrolase | protein metabolism |
| 212190_at | 5270 | serine (or cysteine) proteinase inhibitor, | protein metabolism |
| | | clade E (nexin, plasminogen activator | |
| | | inhibitor type 1), member 2 | |
| 212190_at | 5270 | serine (or cysteine) proteinase inhibitor, | regulation of metabolism |
| | | clade E (nexin, plasminogen activator | |
| | | inhibitor type 1), member 2 | |
| 205557_at | 671 | bactericidal/permeability-increasing | response to abiotic stimulus |
| | | protein | |
| 202437_s_at | 1545 | cytochrome P450, family 1, subfamily | response to abiotic stimulus |
| | | B, polypeptide 1 | |
| 209906_at | 719 | complement component 3a receptor 1 | response to biotic stimulus |
| 211506_s_at | 3576 | interleukin 8 | response to biotic stimulus |
| 205557_at | 671 | bactericidal/permeability-increasing protein | response to biotic stimulus |
| 207113_s_at | 7124 | tumor necrosis factor (TNF superfamily, | response to biotic stimulus |
| | | member 2) | |
| 203923_s_at | 1536 | cytochrome b-245, beta polypeptide | response to biotic stimulus |
| | | (chronic granulomatous disease) | |
| 204446_s_at | 240 | arachidonate 5-lipoxygenase | response to biotic stimulus |
| 204174_at | 241 | arachidonate 5-lipoxygenase-activating | response to biotic stimulus |
| | | protein | |
| 204118_at | 962 | CD48 antigen (B-cell membrane protein) | response to biotic stimulus |
| 208771_s_at | 4048 | leukotriene A4 hydrolase | response to biotic stimulus |
| 216950_s_at | 2209 | Fc fragment of IgG, high affinity Ia, receptor | response to biotic stimulus |
| | | for (CD64) | |

### Cell Proliferation

| | LOCUS | | |
|---|---|---|---|
| AFFX_ID | LINK | GENE NAME | CLASSIFICATION |
| 201612_at | 223 | aldehyde dehydrogenase 9 family, | aldehyde metabolism |
| | | member A1 | |
| 210942_s_at | 10402 | alpha2,3-sialyltransferase | amine metabolism |
| 206643_at | 3034 | histidine ammonia-lyase | amine metabolism |
| 206643_at | 3034 | histidine ammonia-lyase | amino acid and derivative |
| | | | metabolism |
| 210942_s_at | 10402 | alpha2,3-sialyltransferase | biosynthesis |
| 219649_at | 29929 | dolichyl-P-Glc:Man9GlcNAc2-PP- | biosynthesis |
| | | dolichylglucosyltransferase | |
| 200962_at | 6160 | ribosomal protein L31 | biosynthesis |
| 206643_at | 3034 | histidine ammonia-lyase | biosynthesis |
| 204446_s_at | 240 | arachidonate 5-lipoxygenase | biosynthesis |
| 204174_at | 241 | arachidonate 5-lipoxygenase- | biosynthesis |
| | | activating protein | biosynthesis |
| 208771_s_at | 4048 | leukotriene A4 hydrolase | biosynthesis |
| 210942_s_at | 10402 | alpha2,3-sialyltransferase | carbohydrate metabolism |
| 202499_s_at | 6515 | solute carrier family 2 (facilitated | carbohydrate metabolism |
| | | glucose transporter), member 3 | |
| 206643_at | 3034 | histidine ammonia-lyase | catabolism |
| 202551_s_at | 51232 | cysteine-rich motor neuron 1 | catabolism |
| 208771_s_at | 4048 | leukotriene A4 hydrolase | catabolism |
| 212190_at | 5270 | serine (or cysteine) proteinase | catabolism |
| | | inhibitor, clade E (nexin, | |
| | | plasminogen activator inhibitor type | |
| | | 1), member 2 | |
| 211506_s_at | 3576 | interleukin 8 | cell adhesion |
| 207113_s_at | 7124 | tumor necrosis factor (TNF | cell adhesion |
| | | superfamily, member 2) | |
| 201105_at | 3956 | lectin, galactoside-binding, soluble, 1 | cell adhesion |
| | | (galectin 1) | |
| 216250_s_at | 9404 | leupaxin | cell adhesion |
| 219890_at | 23601 | C-type (calcium dependent, | cell adhesion |
| | | carbohydrate-recognition domain) | |
| | | lectin, superfamily member 5 | |
| 214727_at | 675 | breast cancer 2, early onset | cell death |
| 207113_s_at | 7124 | tumor necrosis factor (TNF | cell death |
| | | superfamily, member 2) | |
| 204614_at | 5055 | serine (or cysteine) proteinase | cell death |
| | | inhibitor, clade B (ovalbumin), | |
| | | member 2 | |
| 201105_at | 3956 | lectin, galactoside-binding, soluble, 1 | cell death |
| | | (galectin 1) | |
| 202551_s_at | 51232 | cysteine-rich motor neuron 1 | cell growth |
| 212190_at | 5270 | serine (or cysteine) proteinase | cell migration |
| | | inhibitor, clade E (nexin, | |
| | | plasminogen activator inhibitor type | |
| | | 1), member 2 | |
| 214727_at | 675 | breast cancer 2, early onset | cell organization and biogenesis |
| 201999_s_at | 6993 | t-complex-associated-testis- | cell organization and biogenesis |
| | | expressed 1-like 1 | |
| 204603_at | 9156 | exonuclease 1 | cell proliferation |
| 205053_at | 5557 | primase, polypeptide 1, 49 kDa | cell proliferation |
| 214727_at | 675 | breast cancer 2, early onset | cell proliferation |
| 209773_s_at | 6241 | ribonucleotide reductase M2 polypeptide | cell proliferation |
| 211506_s_at | 3576 | interleukin 8 | cell proliferation |
| 200660_at | 6282 | S100 calcium binding protein A11 | cell proliferation |
| | | (calgizzarin) | |
| 202769_at | 901 | cyclin G2 | cell proliferation |
| 201700_at | 896 | cyclin D3 | cell proliferation |

### Lipid Metabolism

| | LOCUS | | |
|---|---|---|---|
| AFFX_ID | LINK | GENE NAME | CLASSIFICATION |
| 201612_at | 223 | aldehyde dehydrogenase 9 family, | aldehyde metabolism |
| | | member A1 | |
| 210942_s_at | 10402 | alpha2,3-sialyltransferase | amine metabolism |
| 206643_at | 3034 | histidine ammonia-lyase | amine metabolism |
| 206643_at | 3034 | histidine ammonia-lyase | amino acid and derivative |
| | | | metabolism |
| 210942_s_at | 10402 | alpha2,3-sialyltransferase | biosynthesis |
| 219649_at | 29929 | dolichyl-P-Glc:Man9GlcNAc2-PP- | biosynthesis |
| | | dolichylglucosyltransferase | |
| 200962_at | 6160 | ribosomal protein L31 | biosynthesis |
| 206643_at | 3034 | histidine ammonia-lyase | biosynthesis |
| 204446_s_at | 240 | arachidonate 5-lipoxygenase | biosynthesis |
| 204174_at | 241 | arachidonate 5-lipoxygenase- | biosynthesis |
| | | activating protein | |
| 208771_s_at | 4048 | leukotriene A4 hydrolase | biosynthesis |
| 210942_s_at | 10402 | alpha2,3-sialyltransferase | carbohydrate metabolism |
| 202499_s_at | 6515 | solute carrier family 2 (facilitated | carbohydrate metabolism |
| | | glucose transporter), member 3 | |
| 206643_at | 3034 | histidine ammonia-lyase | catabolism |
| 202551_s_at | 51232 | cysteine-rich motor neuron 1 | catabolism |
| 208771_s_at | 4048 | leukotriene A4 hydrolase | catabolism |
| 212190_at | 5270 | serine (or cysteine) proteinase | catabolism |
| | | inhibitor, clade E (nexin, | |
| | | plasminogen activator inhibitor type | |
| | | 1), member 2 | |
| 211506_s_at | 3576 | interleukin 8 | cell adhesion |
| 207113_s_at | 7124 | tumor necrosis factor (TNF | cell adhesion |
| | | superfamily, member 2) | |
| 201105_at | 3956 | lectin, galactoside-binding, soluble, 1 | cell adhesion |
| | | (galectin 1) | |
| 216250_s_at | 9404 | leupaxin | cell adhesion |
| 219890_at | 23601 | C-type (calcium dependent, | cell adhesion |
| | | carbohydrate-recognition domain) | |
| | | lectin, superfamily member 5 | |
| 214727_at | 675 | breast cancer 2, early onset | cell death |
| 207113_s_at | 7124 | tumor necrosis factor (TNF | cell death |
| | | superfamily, member 2) | |
| 204614_at | 5055 | serine (or cysteine) proteinase | cell death |
| | | inhibitor, clade B (ovalbumin), | |
| | | member 2 | |
| 201105_at | 3956 | lectin, galactoside-binding, soluble, 1 | cell death |
| | | (galectin 1) | |
| 202551_s_at | 51232 | cysteine-rich motor neuron 1 | cell growth |
| 212190_at | 5270 | serine (or cysteine) proteinase | cell migration |
| | | inhibitor, clade E (nexin, | |
| | | plasminogen activator inhibitor type | |
| | | 1), member 2 | |
| 214727_at | 675 | breast cancer 2, early onset | cell organization and biogenesis |
| 201999_s_at | 6993 | t-complex-associated-testis- | cell organization and biogenesis |
| | | expressed 1-like 1 | |
| 204603_at | 9156 | exonuclease 1 | cell proliferation |
| 205053_at | 5557 | primase, polypeptide 1, 49 kDa | cell proliferation |
| 214727_at | 675 | breast cancer 2, early onset | cell proliferation |
| 209773_s_at | 6241 | ribonucleotide reductase M2 | cell proliferation |
| | | polypeptide | |
| 211506_s_at | 3576 | interleukin 8 | cell proliferation |
| 200660_at | 6282 | S100 calcium binding protein A11 | cell proliferation |
| | | (calgizzarin) | |
| 202769_at | 901 | cyclin G2 | cell proliferation |
| 201700_at | 896 | cyclin D3 | cell proliferation |
| 211506_s_at | 3576 | interleukin 8 | cell-cell signaling |
| 207113_s_at | 7124 | tumor necrosis factor (TNF | cell-cell signaling |
| | | superfamily, member 2) | |
| 203923_s_at | 1536 | cytochrome b-245, beta polypeptide | electron transport |
| | | (chronic granulomatous disease) | |
| 204446_s_at | 240 | arachidonate 5-lipoxygenase | electron transport |
| 202437_s_at | 1545 | cytochrome P450, family 1, | electron transport |
| | | subfamily B, polypeptide 1 | |
| 203923_s_at | 1536 | cytochrome b-245, beta polypeptide | energy pathways |
| | | (chronic granulomatous disease) | |
| 210942_s_at | 10402 | alpha2,3-sialyltransferase | lipid metabolism |
| 204446_s_at | 240 | arachidonate 5-lipoxygenase | lipid metabolism |
| 204174_at | 241 | arachidonate 5-lipoxygenase-activating | lipid metabolism |
| | | protein | |
| 201963_at | 2180 | fatty-acid-Coenzyme A ligase, long-chain 2 | lipid metabolism |
| 208771_s_at | 4048 | leukotriene A4 hydrolase | lipid metabolism |
| 207275_s_at | 2179 | fatty-acid-Coenzyme A ligase, long-chain 1 | lipid metabolism |

### Programmed Cell Death

| | LOCUS | | |
|---|---|---|---|
| AFFX_ID | LINK | GENE NAME | CLASSIFICATION |
| 201612_at | 223 | aldehyde dehydrogenase 9 family, | aldehyde metabolism |
| | | member A1 | |
| 210942_s_at | 10402 | alpha2,3-sialyltransferase | amine metabolism |
| 206643_at | 3034 | histidine ammonia-lyase | amine metabolism |
| 206643_at | 3034 | histidine ammonia-lyase | amino acid and derivative |
| | | | metabolism |
| 210942_s_at | 10402 | alpha2,3-sialyltransferase | biosynthesis |
| 219649_at | 29929 | dolichyl-P-Glc:Man9GlcNAc2-PP- | biosynthesis |
| | | dolichylglucosyltransferase | |
| 200962_at | 6160 | ribosomal protein L31 | biosynthesis |
| 206643_at | 3034 | histidine ammonia-lyase | biosynthesis |
| 204446_s_at | 240 | arachidonate 5-lipoxygenase | biosynthesis |
| 204174_at | 241 | arachidonate 5-lipoxygenase- | biosynthesis |
| | | activating protein | |
| 208771_s_at | 4048 | leukotriene A4 hydrolase | biosynthesis |
| 210942_s_at | 10402 | alpha2,3-sialyltransferase | carbohydrate metabolism |
| 202499_s_at | 6515 | solute carrier family 2 (facilitated | carbohydrate metabolism |
| | | glucose transporter), member 3 | |
| 206643_at | 3034 | histidine ammonia-lyase | catabolism |
| 202551_s_at | 51232 | cysteine-rich motor neuron 1 | catabolism |
| 208771_s_at | 4048 | leukotriene A4 hydrolase | catabolism |
| 212190_at | 5270 | serine (or cysteine) proteinase | catabolism |
| | | inhibitor, clade E (nexin, | |
| | | plasminogen activator inhibitor type | |
| | | 1), member 2 | |
| 211506_s_at | 3576 | interleukin 8 | cell adhesion |
| 207113_s_at | 7124 | tumor necrosis factor (TNF | cell adhesion |
| | | superfamily, member 2) | |
| 201105_at | 3956 | lectin, galactoside-binding, soluble, 1 | cell adhesion |
| | | (galectin 1) | |
| 216250_s_at | 9404 | leupaxin | cell adhesion |
| 219890_at | 23601 | C-type (calcium dependent, | cell adhesion |
| | | carbohydrate-recognition domain) | |
| | | lectin, superfamily member 5 | |
| 214727_at | 675 | breast cancer 2, early onset | cell death |
| 207113_s_at | 7124 | tumor necrosis factor (TNF | cell death |
| | | superfamily, member 2) | |
| 204614_at | 5055 | serine (or cysteine) proteinase | cell death |
| | | inhibitor, clade B (ovalbumin), | |
| | | member 2 | |
| 201105_at | 3956 | lectin, galactoside-binding, soluble, 1 | cell death |
| | | (galectin 1) | |
| 202551_s_at | 51232 | cysteine-rich motor neuron 1 | cell growth |
| 212190_at | 5270 | serine (or cysteine) proteinase | cell migration |
| | | inhibitor, clade E (nexin, | |
| | | plasminogen activator inhibitor type | |
| | | 1), member 2 | |
| 214727_at | 675 | breast cancer 2, early onset | cell organization and biogenesis |
| 201999_s_at | 6993 | t-complex-associated-testis- | cell organization and biogenesis |
| | | expressed 1-like 1 | |
| 204603_at | 9156 | exonuclease 1 | cell proliferation |
| 205053_at | 5557 | primase, polypeptide 1, 49 kDa | cell proliferation |
| 214727_at | 675 | breast cancer 2, early onset | cell proliferation |
| 209773_s_at | 6241 | ribonucleotide reductase M2 | cell proliferation |
| | | polypeptide | |
| 211506_s_at | 3576 | interleukin 8 | cell proliferation |
| 200660_at | 6282 | S100 calcium binding protein A11 | cell proliferation |
| | | (calgizzarin) | |
| 202769_at | 901 | cyclin G2 | cell proliferation |
| 201700_at | 896 | cyclin D3 | cell proliferation |
| 211506_s_at | 3576 | interleukin 8 | cell-cell signaling |
| 207113_s_at | 7124 | tumor necrosis factor (TNF | cell-cell signaling |
| | | superfamily, member 2) | |
| 203923_s_at | 1536 | cytochrome b-245, beta polypeptide | electron transport |
| | | (chronic granulomatous disease) | |
| 204446_s_at | 240 | arachidonate 5-lipoxygenase | electron transport |
| 202437_s_at | 1545 | cytochrome P450, family 1, | electron transport |
| | | subfamily B, polypeptide 1 | |
| 203923_s_at | 1536 | cytochrome b-245, beta polypeptide | energy pathways |
| | | (chronic granulomatous disease) | |
| 210942_s_at | 10402 | alpha2,3-sialyltransferase | lipid metabolism |
| 204446_s_at | 240 | arachidonate 5-lipoxygenase | lipid metabolism |
| 204174_at | 241 | arachidonate 5-lipoxygenase- | lipid metabolism |
| | | activating protein | |
| 201963_at | 2180 | fatty-acid-Coenzyme A ligase, long- | lipid metabolism |
| | | chain 2 | |
| 208771_s_at | 4048 | leukotriene A4 hydrolase | lipid metabolism |
| 207275_s_at | 2179 | fatty-acid-Coenzyme A ligase, long- | lipid metabolism |
| | | chain 1 | |
| 209906_at | 719 | complement component 3a receptor 1 | muscle contraction |
| 204603_at | 9156 | exonuclease 1 | nucleobase, nucleoside, |
| | | | nucleotide and nucleic acid |
| | | | metabolism |
| 202338_at | 7083 | thymidine kinase 1, soluble | nucleobase, nucleoside, |
| | | | nucleotide and nucleic acid |
| | | | metabolism |
| 218384_at | 23589 | calcium regulated heat stable protein | nucleobase, nucleoside, |
| | | 1, 24 kDa | nucleotide and nucleic acid |
| | | | metabolism |
| 205053_at | 5557 | primase, polypeptide 1, 49 kDa | nucleobase, nucleoside, |
| | | | nucleotide and nucleic acid |
| | | | metabolism |
| 203409_at | 1643 | damage-specific DNA binding | nucleobase, nucleoside, |
| | | protein 2, 48 kDa | nucleotide and nucleic acid |
| | | | metabolism |
| 214727_at | 675 | breast cancer 2, early onset | nucleobase, nucleoside, |
| | | | nucleotide and nucleic acid |
| | | | metabolism |
| 209773_s_at | 6241 | ribonucleotide reductase M2 | nucleobase, nucleoside, |
| | | polypeptide | nucleotide and nucleic acid |
| | | | metabolism |
| 207113_s_at | 7124 | tumor necrosis factor (TNF | nucleobase, nucleoside, |
| | | superfamily, member 2) | nucleotide and nucleic acid |
| | | | metabolism |
| 200660_at | 6282 | S100 calcium binding protein A11 | nucleobase, nucleoside, |
| | | (calgizzarin) | nucleotide and nucleic acid |
| | | | metabolism |
| 209930_s_at | 4778 | nuclear factor (erythroid-derived 2), | nucleobase, nucleoside, |
| | | 45 kDa | nucleotide and nucleic acid |
| | | | metabolism |
| 201989_s_at | 1389 | cAMP responsive element binding | nucleobase, nucleoside, |
| | | protein-like 2 | nucleotide and nucleic acid |
| | | | metabolism |
| 209301_at | 760 | carbonic anhydrase II | one-carbon compound |
| | | | metabolism |
| 206643_at | 3034 | histidine ammonia-lyase | organic acid metabolism |
| 204446_s_at | 240 | arachidonate 5-lipoxygenase | organic acid metabolism |
| 204174_at | 241 | arachidonate 5-lipoxygenase- | organic acid metabolism |
| | | activating protein | |
| 201963_at | 2180 | fatty-acid-Coenzyme A ligase, long- | organic acid metabolism |
| | | chain 2 | |
| 208771_s_at | 4048 | leukotriene A4 hydrolase | organic acid metabolism |
| 207275_s_at | 2179 | fatty-acid-Coenzyme A ligase, long- | organic acid metabolism |
| | | chain 1 | |
| 211506_s_at | 3576 | interleukin 8 | organogenesis |
| 205807_s_at | 7286 | tuftelin 1 | organogenesis |
| 218224_at | 9240 | paraneoplastic antigen MA1 | organogenesis |
| 202551_s_at | 51232 | cysteine-rich motor neuron 1 | organogenesis |
| 202437_s_at | 1545 | cytochrome P450, family 1, | organogenesis |
| | | subfamily B, polypeptide 1 | |
| 205807_s_at | 7286 | tuftelin 1 | ossification |
| 202437_s_at | 1545 | cytochrome P450, family 1, | perception of external stimulus |
| | | subfamily B, polypeptide 1 | |
| 209457_at | 1847 | dual specificity phosphatase 5 | phosphorus metabolism |
| 214727_at | 675 | breast cancer 2, early onset | programmed cell death |
| 207113_s_at | 7124 | tumor necrosis factor (TNF superfamily, | programmed cell death |
| | | member 2) | |
| 204614_at | 5055 | serine (or cysteine) proteinase inhibitor, | programmed cell death |
| | | clade B (ovalbumin), member 2 | |
| 201105_at | 3956 | lectin, galactoside-binding, soluble, 1 | programmed cell death |
| | | (galectin 1) | |

VX-944 (Early n Late) vs. MPA (Early ∩ Late): 43 genes were found to be in common for this stringent comparison. These genes were binned into the following functional

### Fatty Acid Metabolism

| | LOCUS | | |
|---|---|---|---|
| AFFYID | LINK | GENE NAME | CLASSIFICATION |
| 203455_s_at | 6303 | spermidine/spermine N1- | Arginine and proline |
| | | acetyltransferase | metabolism |
| 205053_at | 5557 | primase, polypeptide 1, | DNApolymerase |
| | | 49 kDa | |
| 202437_s_at | 1545 | cytochrome P450, | Fatty acid |
| | | family 1, subfamily B, | metabolism |
| | | polypeptide 1 | |
| 207275_s_at | 2179 | fatty-acid-Coenzyme A | Fatty acid |
| | | ligase, long-chain 1 | metabolism |
| 201963_at | 2180 | fatty-acid-Coenzyme A | Fatty acid |
| | | ligase, long-chain 2 | metabolism |

### Prostaglandin and Leukotriene Metabolism

| | LOCUS | | |
|---|---|---|---|
| AFFYID | LINK | GENE NAME | CLASSIFICATION |
| 203455_s_at | 6303 | spermidine/spermine N1- | Arginine and proline metabolism |
| | | acetyltransferase | |
| 205053_at | 5557 | primase, polypeptide 1, 49 kDa | DNApolymerase |
| 202437_s_at | 1545 | cytochrome P450, family 1, | Fatty acid metabolism |
| | | subfamily B, polypeptide 1 | |
| 207275_s_at | 2179 | fatty-acid-Coenzyme A ligase, long- | Fatty acid metabolism |
| | | chain 1 | |
| 201963_at | 2180 | fatty-acid-Coenzyme A ligase, long- | Fatty acid metabolism |
| | | chain 2 | |
| 204446_s_at | 240 | arachidonate 5-lipoxygenase | Prostaglandin and leukotriene |
| | | | metabolism |
| 208771_s_at | 4048 | leukotriene A4 hydrolase | Prostaglandin and leukotriene |
| | | | metabolism |

### Others

| | LOCUS | | |
|---|---|---|---|
| AFFYID | LINK | GENE NAME | CLASSIFICATION |
| 203455_s_at | 6303 | spermidine/spermine N1-acetyltransferase | Arginine and proline metabolism |
| 205053_at | 5557 | primase, polypeptide 1, 49 kDa | DNApolymerase |
| 204446_s_at | 240 | arachidonate 5-lipoxygenase | Prostaglandin andleukotriene |
| | | | metabolism |
| 208771_s_at | 4048 | leukotriene A4 hydrolase | Prostaglandin andleukotriene |
| | | | metabolism |
| 209773_s_at | 6241 | ribonucleotide reductase M2 polypeptide | Purine metabolism |
| 209773_s_at | 6241 | ribonucleotide reductase M2 polypeptide | Pyrimidine metabolism |
| 200962_at | 6160 | ribosomal protein L31 | Ribosome |
| 202437_s_at | 1545 | cytochrome P450, family 1, subfamily B, | Tryptophan metabolism |
| | | polypeptide 1 | |
| 209457_at | 1847 | dual specificity phosphatase 5 | Phosphatidylinositol signaling |
| | | | system |
| 202437_s_at | 1545 | cytochrome P450, family 1, subfamily B, | gamma-Hexachlorocyclohexane |
| | | polypeptide 1 | degradation |
| 214086_s_at | 10038 | ADP-ribosyltransferase (NAD+; poly(ADP- | |
| | | ribose) polymerase)-like 2 | |
| 210942_s_at | 10402 | alpha2,3-sialyltransferase | |
| 202814_s_at | 10614 | HMBA-inducible | |
| 203923_s_at | 1536 | cytochrome b-245, beta polypeptide (chronic | |
| | | granulomatous disease) | |
| 203409_at | 1643 | damage-specific DNA binding protein 2, 48 kDa | |
| 205229_s_at | 1690 | coagulation factor C homolog, cochlin (Limulus | |
| | | polyphemus) | |
| 213572_s_at | 1992 | serine (or cysteine) proteinase inhibitor, clade B | |
| | | (ovalbumin), member 1 | |
| 216950_s_at | 2209 | Fc fragment of IgG, high affinity Ia, receptor for | |
| | | (CD64) | |
| 219890_at | 23601 | C-type (calcium dependent, carbohydrate- | |
| | | recognition domain) lectin, superfamily member 5 | |
| 204174_at | 241 | arachidonate 5-lipoxygenase-activating protein | |
| 211506_s_at | 3576 | interleukin 8 | |
| 200618_at | 3927 | LIM and SH3 protein 1 | |
| 204614_at | 5055 | serine (or cysteine) proteinase inhibitor, clade B | |
| | | (ovalbumin), member 2 | |
| 203960_s_at | 51668 | HSPCO34 protein | |
| 212190_at | 5270 | serine (or cysteine) proteinase inhibitor, clade E | |
| | | (nexin, plasminogen activator inhibitor type 1), | |
| | | member 2 | |
| 219296_at | 54503 | HIP14-related protein | |
| 219148_at | 55872 | T-LAK cell-originated protein kinase | |
| 221882_s_at | 58986 | transmembrane protein 8 (five membrane- | |
| | | spanning domains) | |
| 203344_s_at | 5932 | retinoblastoma binding protein 8 | |
| 200660_at | 6282 | S100 calcium binding protein A11 (calgizzarin) | |
| 204351_at | 6286 | S100 calcium binding protein P | |
| 202499_s_at | 6515 | solute carrier family 2 (facilitated glucose | |
| | | transporter), member 3 | |
| 205557_at | 671 | bactericidal/permeability-increasing protein | |
| 214727_at | 675 | breast cancer 2, early onset | |
| 203303_at | 6990 | t-complex-associated-testis-expressed 1-like | |
| 201999_s_at | 6993 | t-complex-associated-testis-expressed 1-like 1 | |
| 205807_s_at | 7286 | tuftelin 1 | |
| 201426_s_at | 7431 | vimentin | |
| 203046_s_at | 8914 | timeless homolog (Drosophila) | |
| 218224_at | 9240 | paraneoplastic antigen MA1 | |
| 216250_s_at | 9404 | leupaxin | |
| 200704_at | 9516 | lipopolysaccharide-induced TNF factor | |
| 211429_s_at | | | |

### Processed Data—Gene Lists

[0154] For each of the comparative analyses set up for this project, the processed data in the form of gene lists with hyperlinks to various databases has been prepared and is represented in Appendix III.

[0155] A snapshot of one of these gene lists is shown below. Each of the columns referring to an external database (GENE CARDS at the Weizmann Institute, Locus Link and OMIM at the NIH) has a hyperlink, which when accessed will pull in data corresponding to that gene.

| | | FOLD | FOLD | | | | | | |
|---|---|---|---|---|---|---|---|---|---|
| | | CHANGE | CHANGE | | | | | | Path- |
| Gene | | (944, | (MPA, | Functional | GENE | LOCUS | | Pathways | ways |
| Symbol | TITLE | EARLY) | EARLY) | Annotation | CARDS | LINK | OMIM | GenMAPP | KEGG |
| C6orf18 | chromosome 6 open reading | 2.0 | 1.5 | | C6orf18 | 54535 | 605310 | — | — |
| | frame 18 | | | | | | | | |
| TMEM8 | transmembrane protein 8 (five | 1.5 | 1.7 | biological_proce [symbol] | TMEM8 | 58986 | | — | — |
| | membrane-spanning domains) | | | | | | | | |
| MGC13024 | hypothetical protein | 1.6 | 1.5 | | MGC13024 | 93129 | | — | — |
| | MGC13024 | | | | | | | | |
| C8orf2 | chromosome 8 open reading | 1.7 | 1.5 | biological_proce [symbol] | C8orf2 | 11160 | | — | — |
| | frame 2 | | | | | | | | |
| RAGD | Rag D protein | 1.7 | 1.5 | | RAGD | 58528 | | — | — |
| MLC-B | myosin regulatory light chain | 1.9 | 1.8 | calcium ion bind [symbol] | MRLC2 | 103910 | | — | — |
| | MRLC2 | | | | | | | | |
| CLECSF5 | C-type (calcium dependent, | 2.1 | 1.5 | heterophilic cell | CLECSF5 | 23601 | 604987 | — | — |
| | carbohydrate-recognition | | | | | | | | |
| | domain) lectin, superfamily | | | | | | | | |
| | member 5 | | | | | | | | |
| ALG6 | dolichyl-P- | 1.6 | 1.5 | N-linked glycos [symbol] | ALG6 | 29929 | 604566 | GPCRs_Other | — |
| | Glc:Man9GlcNAc2-PP- | | | | | | | | |
| | dolichylglucosyltransferase | | | | | | | | |
| C21orf4 | chromosome 21 open reading | 1.5 | 1.5 | biological_proce [symbol] | C21orf4 | 757 | | — | — |
| | frame 4 | | | | | | | | |
| FLJ10852 | HIP14-related protein | 1.7 | 1.5 | | HIP14L | 54503 | | — | — |
| KLHL2 | kelch-like 2, Mayven | 2.0 | 1.6 | actin binding ac [symbol] | KLHL2 | 11275 | 605774 | — | — |
| | (Drosophila) | | | | | | | | |
| TOPK | T-LAK cell-originated protein | 1.7 | 1.5 | | TOPK | 55872 | | — | — |
| | kinase | | | | | | | | |
| FBXO5 | F-box only protein 5 | 1.7 | 1.6 | proteolysis and | FBXO5 | 26271 | 606013 | — | — |
| SNX10 | sorting nexin 10 | 1.8 | 1.5 | | SNX10 | 29887 | | — | — |
| RPAC2 | polymerase (RNA) I | 1.5 | 1.5 | DNA binding act [symbol] | POLR1D | 51082 | | — | — |
| | polypeptide D, 16 kDa | | | | | | | | |

[symbol]

indicates data missing or illegible when filed

[0156] In addition, a subset of the data was mapped onto relevant pathways, using the KEGG database. The following gene sets 2 and 3 also may be used in the arrays of the invention and are useful predictors of IMPDH inhibition. Particularly preferred exemplary markers of IMPDH inhibition are ARF4 (SEQ ID NO:______); CCNE2 (SEQ ID NO:______); CGR19 (SEQ ID NO:______); CPR8 (SEQ ID NO:______); EDF1 (SEQ ID NO:______); GTF2F1 (______); LGALS1 (SEQ ID NO:______); PDGFC (SEQ ID NO:______); PSMC5 (SEQ ID NO:______); PTK9 (SEQ ID NO:______); RABGGTA (SEQ ID NO:______); SCAP2 (SEQ ID NO:______); SERPINB2 (SEQ ID NO:______); TBPL1 (SEQ ID NO:______).

### Gene Set 2

| Affymetrix_ID | Title | Gene Symbol |
|---|---|---|
| 200618_at | LIM and SH3 protein 1 | LASP1 |
| 200644_at | MARCKS-like protein | MLP |
| 200660_at | S100 calcium binding protein A11 (calgizzarin) | S100A11 |
| 200704_at | LPS-induced TNF-alpha factor | PIG7 |
| 200788_s_at | phosphoprotein enriched in astrocytes 15 | PEA15 |
| 200904_at | major histocompatibility complex, class I, E | HLA-E |
| 200911_s_at | transforming, acidic coiled-coil containing protein 1 | TACC1 |
| 200931_s_at | vinculin | VCL |
| 200962_at | Homo sapiens cDNA FLJ36224 fis, clone | — |
| | THYMU2000990, mRNA sequence | |
| 201012_at | annexin A1 | ANXA1 |
| 201034_at | adducin 3 (gamma) | ADD3 |
| 201069_at | matrix metalloproteinase 2 (gelatinase A, 72 kDa | MMP2 |
| | gelatinase, 72 kDa type IV collagenase) | |
| 201097_s_at | ADP-ribosylation factor 4 | ARF4 |
| 201136_at | proteolipid protein 2 (colonic epithelium-enriched) | PLP2 |
| 201170_s_at | basic helix-loop-helix domain containing, class B, 2 | BHLHB2 |
| 201300_s_at | prion protein (p27-30) (Creutzfeld-Jakob disease, | PRNP |
| | Gerstmann-Strausler-Scheinker syndrome, fatal | |
| | familial insomnia) | |
| 201329_s_at | v-ets erythroblastosis virus E26 oncogene homolog 2 | ETS2 |
| | (avian) | |
| 201362_at | NS1-binding protein | NS1-BP |
| 201422_at | interferon, gamma-inducible protein 30 | IFI30 |
| 201426_s_at | vimentin | VIM |
| 201468_s_at | NAD(P)H dehydrogenase, quinone 1 | NQO1 |
| 201471_s_at | sequestosome 1 | SQSTM1 |
| 201502_s_at | nuclear factor of kappa light polypeptide gene | NFKBIA |
| | enhancer in B-cells inhibitor, alpha | |
| 201590_x_at | annexin A2 | ANXA2 |
| 201612_at | aldehyde dehydrogenase 9 family, member A1 | ALDH9A1 |
| 201628_s_at | Ras-related GTP-binding protein | RAGA |
| 201641_at | bone marrow stromal cell antigen 2 | BST2 |
| 201656_at | integrin, alpha 6 | ITGA6 |
| 201666_at | tissue inhibitor of metalloproteinase 1 (erythroid | TIMP1 |
| | potentiating activity, collagenase inhibitor) | |
| 201710_at | v-myb myeloblastosis viral oncogene homolog | MYBL2 |
| | (avian)-like 2 | |
| 201714_at | tubulin, gamma 1 | TUBG1 |
| 201745_at | PTK9 protein tyrosine kinase 9 /// PTK9 protein | PTK9 |
| | tyrosine kinase 9 | |
| 201772_at | ornithine decarboxylase antizyme inhibitor | OAZIN |
| 201850_at | capping protein (actin filament), gelsolin-like | CAPG |
| 201908_at | dishevelled, dsh homolog 3 (Drosophila) | DVL3 |
| 201920_at | solute carrier family 20 (phosphate transporter), | SLC20A1 |
| | member 1 | |
| 201921_at | guanine nucleotide binding protein (G protein), | GNG10 |
| | gamma 10 | |
| 201925_s_at | decay accelerating factor for complement (CD55, | DAF |
| | Cromer blood group system) | |
| 201963_at | fatty-acid-Coenzyme A ligase, long-chain 2 | FACL2 |
| 201969_at | nuclear autoantigenic sperm protein (histone-binding) | NASP |
| 201999_s_at | t-complex-associated-testis-expressed 1-like 1 | TCTEL1 |
| 202145_at | lymphocyte antigen 6 complex, locus E | LY6E |
| 202191_s_at | growth arrest-specific 7 | GAS7 |
| 202197_at | myotubularin related protein 3 | MTMR3 |
| 202207_at | ADP-ribosylation factor-like 7 | ARL7 |
| 202241_at | phosphoprotein regulated by mitogenic pathways | C8FW |
| 202256_at | CD2 antigen (cytoplasmic tail) binding protein 2 | CD2BP2 |
| 202276_at | Deleted in split-hand/split-foot 1 region | DSS1 |
| 202355_s_at | general transcription factor IIF, polypeptide 1, 74 kDa | GTF2F1 |
| 202384_s_at | Treacher Collins-Franceschetti syndrome 1 | TCOF1 |
| 202393_s_at | TGFB inducible early growth response | TIEG |
| 202405_at | Homo sapiens cDNA FLJ43274 fis, clone | — |
| | KIDNE2008914 | |
| 202437_s_at | cytochrome P450, subfamily I (dioxin-inducible), | CYP1B1 |
| | polypeptide 1 (glaucoma 3, primary infantile) | |
| 202447_at | 2,4-dienoyl CoA reductase 1, mitochondrial | DECR1 |
| 202506_at | sperm specific antigen 2 | SSFA2 |
| 202528_at | galactose-4-epimerase, UDP- | GALE |
| 202530_at | mitogen-activated protein kinase 14 | MAPK14 |
| 202532_s_at | dihydrofolate reductase | DHFR |
| 202551_s_at | cysteine-rich motor neuron 1 | CRIM1 |
| 202554_s_at | glutathione S-transferase M3 (brain) | GSTM3 |
| 202569_s_at | MAP/microtubule affinity-regulating kinase 3 | MARK3 |
| 202589_at | thymidylate synthetase | TYMS |
| 202611_s_at | cofactor required for Sp1 transcriptional activation, | CRSP2 |
| | subunit 2, 150 kDa | |
| 202611_s_at | cofactor required for Sp1 transcriptional activation, | CRSP2 |
| | subunit 2, 150 kDa | |
| 202644_s_at | tumor necrosis factor, alpha-induced protein 3 | TNFAIP3 |
| 202679_at | Niemann-Pick disease, type C1 | NPC1 |
| 202745_at | ubiquitin specific protease 8 | USP8 |
| 202769_at | Homo sapiens mRNA; cDNA DKFZp434B142 (from | — |
| | clone DKFZp434B142), mRNA sequence | |
| 202794_at | inositol polyphosphate-1-phosphatase | INPP1 |
| 202811_at | associated molecule with the SH3 domain of STAM | AMSH |
| 202814_s_at | HMBA-inducible | HIS1 |
| 202842_s_at | DnaJ (Hsp40) homolog, subfamily B, member 9 | DNAJB9 |
| 202917_s_at | S100 calcium binding protein A8 (calgranulin A) | S100A8 |
| 202933_s_at | v-yes-1 Yamaguchi sarcoma viral oncogene homolog 1 | YES1 |
| 202942_at | electron-transfer-flavoprotein, beta polypeptide | ETFB |
| 202951_at | serine/threonine kinase 38 | STK38 |
| 202957_at | hematopoietic cell-specific Lyn substrate 1 | HCLS1 |
| 202990_at | phosphorylase, glycogen; liver (Hers disease, | PYGL |
| | glycogen storage disease type VI) | |
| 203006_at | inositol polyphosphate-5-phosphatase, 40 kDa | INPP5A |
| 203046_s_at | timeless homolog (Drosophila) | TIMELESS |
| 203185_at | Ras association (RalGDS/AF-6) domain family 2 | RASSF2 |
| 203201_at | phosphomannomutase 2 | PMM2 |
| 203274_at | coagulation factor VIII-associated (intronic transcript) | F8A |
| 203275_at | interferon regulatory factor 2 | IRF2 |
| 203301_s_at | cyclin D binding myb-like transcription factor 1 | DMTF1 |
| 203303_at | H1 histone family, member X | H1FX |
| 203314_at | pseudoautosomal GTP-binding protein-like | PGPL |
| 203320_at | lymphocyte adaptor protein | LNK |
| 203335_at | phytanoyl-CoA hydroxylase (Refsum disease) | PHYH |
| 203344_s_at | retinoblastoma binding protein 8 | RBBP8 |
| 203349_s_at | ets variant gene 5 (ets-related molecule) | ETV5 |
| 203358_s_at | enhancer of zeste homolog 2 (Drosophila) | EZH2 |
| 203370_s_at | enigma (LIM domain protein) | ENIGMA |
| 203388_at | arrestin, beta 2 | ARRB2 |
| 203401_at | phosphoribosyl pyrophosphate synthetase 2 | PRPS2 |
| 203409_at | damage-specific DNA binding protein 2, 48 kDa | DDB2 |
| 203414_at | monocyte to macrophage differentiation-associated | MMD |
| 203455_s_at | spermidine/spermine N1-acetyltransferase | SAT |
| 203471_s_at | pleckstrin | PLEK |
| 203521_s_at | endocrine regulator | ZFP318 |
| 203535_at | S100 calcium binding protein A9 (calgranulin B) | S100A9 |
| 203559_s_at | amiloride binding protein 1 (amine oxidase (copper- | ABP1 |
| | containing)) | |
| 203560_at | gamma-glutamyl hydrolase (conjugase, | GGH |
| | folylpolygammaglutamyl hydrolase) | |
| 203564_at | Fanconi anemia, complementation group G | FANCG |
| 203573_s_at | Rab geranylgeranyltransferase, alpha subunit | RABGGTA |
| 203574_at | nuclear factor, interleukin 3 regulated | NFIL3 |
| 203611_at | telomeric repeat binding factor 2 | TERF2 |
| 203659_s_at | ret finger protein 2 | RFP2 |
| 203706_s_at | frizzled homolog 7 (Drosophila) | FZD7 |
| 203752_s_at | jun D proto-oncogene | JUND |
| 203757_s_at | carcinoembryonic antigen-related cell adhesion | CEACAM6 |
| | molecule 6 (non-specific cross reacting antigen) | |
| 203761_at | Src-like-adaptor | SLA |
| 203880_at | popeye domain containing 2 | POPDC2 |
| 203923_s_at | cytochrome b-245, beta polypeptide (chronic | CYBB |
| | granulomatous disease) | |
| 203943_at | kinesin family member 3B | KIF3B |
| 203960_s_at | HSPCO34 protein | LOC51668 |
| 204023_at | replication factor C (activator 1) 4, 37 kDa | RFC4 |
| 204026_s_at | ZW10 interactor | ZWINT |
| 204116_at | interleukin 2 receptor, gamma (severe combined | IL2RG |
| | immunodeficiency) | |
| 204143_s_at | rTS beta protein | HSRTSBETA |
| 204146_at | RAD51-interacting protein | PIR51 |
| 204162_at | highly expressed in cancer, rich in leucine heptad | HEC |
| | repeats | |
| 204174_at | arachidonate 5-lipoxygenase-activating protein | ALOX5AP |
| 204203_at | CCAAT/enhancer binding protein (C/EBP), gamma | CEBPG |
| 204220_at | glia maturation factor, gamma | GMFG |
| 204232_at | Fc fragment of IgE, high affinity I, receptor for; | FCER1G |
| | gamma polypeptide | |
| 204275_at | small optic lobes homolog (Drosophila) | SOLH |
| 204286_s_at | phorbol-12-myristate-13-acetate-induced protein 1 | PMAIP1 |
| 204351_at | S100 calcium binding protein P | S100P |
| 204362_at | src family associated phosphoprotein 2 | SCAP2 |
| 204417_at | galactosylceramidase (Krabbe disease) | GALC |
| 204440_at | CD83 antigen (activated B lymphocytes, | CD83 |
| | immunoglobulin superfamily) | |
| 204444_at | kinesin-like 1 | KNSL1 |
| 204446_s_at | arachidonate 5-lipoxygenase | ALOX5 |
| 204490_s_at | CD44 antigen (homing function and Indian blood | CD44 |
| | group system) | |
| 204493_at | BH3 interacting domain death agonist | BID |
| 204531_s_at | breast cancer 1, early onset | BRCA1 |
| 204603_at | exonuclease 1 | EXO1 |
| 204605_at | cell growth regulator with ring finger domain 1 | CGRRF1 |
| 204614_at | serine (or cysteine) proteinase inhibitor, clade B | SERPINB2 |
| | (ovalbumin), member 2 | |
| 204635_at | ribosomal protein S6 kinase, 90 kDa, polypeptide 5 | RPS6KA5 |
| 204655_at | chemokine (C-C motif) ligand 5 | CCL5 |
| 204690_at | syntaxin 8 | STX8 |
| 204695_at | cell division cycle 25A | CDC25A |
| 204742_s_at | androgen-induced proliferation inhibitor | APRIN |
| 204759_at | chromosome condensation 1-like | CHC1L |
| 204774_at | ecotropic viral integration site 2A | EVI2A |
| 204786_s_at | interferon (alpha, beta and omega) receptor 2 | IFNAR2 |
| 204857_at | MAD1 mitotic arrest deficient-like 1 (yeast) | MAD1L1 |
| 204887_s_at | serine/threonine kinase 18 | STK18 |
| 204961_s_at | neutrophil cytosolic factor 1 (47 kDa, chronic | NCF1 |
| | granulomatous disease, autosomal 1) | |
| 204971_at | cystatin A (stefin A) | CSTA |
| 205034_at | cyclin E2 | CCNE2 |
| 205041_s_at | orosomucoid 1 | ORM1 |
| 205053_at | primase, polypeptide 1, 49 kDa | PRIM1 |
| 205063_at | survival of motor neuron protein interacting protein 1 | SIP1 |
| 205070_at | inhibitor of growth family, member 3 | ING3 |
| 205098_at | chemokine (C-C motif) receptor 1 | CCR1 |
| 205142_x_at | ATP-binding cassette, sub-family D (ALD), member 1 | ABCD1 |
| 205176_s_at | integrin beta 3 binding protein (beta3-endonexin) | ITGB3BP |
| 205204_at | neuromedin B | NMB |
| 205214_at | serine/threonine kinase 17b (apoptosis-inducing) | STK17B |
| 205229_s_at | coagulation factor C homolog, cochlin (Limulus | COCH |
| | polyphemus) | |
| 205260_s_at | acylphosphatase 1, erythrocyte (common) type | ACYP1 |
| 205269_at | lymphocyte cytosolic protein 2 (SH2 domain | LCP2 |
| | containing leukocyte protein of 76 kDa) | |
| 205282_at | low density lipoprotein receptor-related protein 8, | LRP8 |
| | apolipoprotein e receptor | |
| 205345_at | BRCA1 associated RING domain 1 | BARD1 |
| 205361_s_at | prefoldin 4 | PFDN4 |
| 205419_at | Epstein-Barr virus induced gene 2 (lymphocyte- | EBI2 |
| | specific G protein-coupled receptor) | |
| 205546_s_at | tyrosine kinase 2 | TYK2 |
| 205548_s_at | BTG family, member 3 | BTG3 |
| 205557_at | bactericidal/permeability-increasing protein | BPI |
| 205658_s_at | small nuclear RNA activating complex, polypeptide 4, | SNAPC4 |
| | 190 kDa | |
| 205681_at | BCL2-related protein A1 | BCL2A1 |
| 205726_at | diaphanous homolog 2 (Drosophila) | DIAPH2 |
| 205756_s_at | coagulation factor VIII, procoagulant component | F8 |
| | (hemophilia A) | |
| 205756_s_at | coagulation factor VIII, procoagulant component | F8 |
| | (hemophilia A) | |
| 205769_at | solute carrier family 27 (fatty acid transporter), | SLC27A2 |
| | member 2 | |
| 205807_s_at | tuftelin 1 | TUFT1 |
| 206060_s_at | protein tyrosine phosphatase, non-receptor type 22 | PTPN22 |
| | (lymphoid) | |
| 206066_s_at | RAD51 homolog C (S. cerevisiae) | RAD51C |
| 206111_at | ribonuclease, RNase A family, 2 (liver, eosinophil- | RNASE2 |
| | derived neurotoxin) | |
| 206157_at | pentaxin-related gene, rapidly induced by IL-1 beta | PTX3 |
| 206332_s_at | interferon, gamma-inducible protein 16 | IFI16 |
| 206332_s_at | interferon, gamma-inducible protein 16 | IFI16 |
| 206550_s_at | nucleoporin 155 kDa | NUP155 |
| 206571_s_at | mitogen-activated protein kinase kinase kinase kinase 4 | MAP4K4 |
| 206572_x_at | zinc finger protein 85 (HPF4, HTF1) | ZNF85 |
| 206589_at | growth factor independent 1 | GFI1 |
| 206643_at | histidine ammonia-lyase | HAL |
| 206676_at | carcinoembryonic antigen-related cell adhesion | CEACAM8 |
| | molecule 8 | |
| 206695_x_at | zinc finger protein 43 (HTF6) | ZNF43 |
| 206734_at | jerky homolog-like (mouse) | JRKL |
| 206790_s_at | NADH dehydrogenase (ubiquinone) 1 beta | NDUFB1 |
| | subcomplex, 1, 7 kDa | |
| 207121_s_at | mitogen-activated protein kinase 6 | MAPK6 |
| 207153_s_at | FKBP-associated protein | FAP48 |
| 207198_s_at | LIM and senescent cell antigen-like domains 1 | LIMS1 |
| 207275_s_at | fatty-acid-Coenzyme A ligase, long-chain 1 | FACL1 |
| 207338_s_at | zinc finger protein 200 | ZNF200 |
| 207339_s_at | lymphotoxin beta (TNF superfamily, member 3) | LTB |
| 207522_s_at | ATPase, Ca++ transporting, ubiquitous | ATP2A3 |
| 207563_s_at | O-linked N-acetylglucosamine (GlcNAc) transferase | OGT |
| | (UDP-N-acetylglucosamine:polypeptide-N- | |
| | acetylglucosaminyl transferase) | |
| 208082_x_at | makorin, ring finger protein, 4 | MKRN4 |
| 208107_s_at | exonuclease NEF-sp | LOC81691 |
| 208151_x_at | DEAD/H (Asp-Glu-Ala-Asp/His) box polypeptide 17, | DDX17 |
| | 72 kDa | |
| 208369_s_at | glutaryl-Coenzyme A dehydrogenase | GCDH |
| 208398_s_at | TBP-like 1 | TBPL1 |
| 208540_x_at | S100 calcium binding protein A11 pseudogene | S100A11P |
| 208611_s_at | spectrin, alpha, non-erythrocytic 1 (alpha-fodrin) | SPTAN1 |
| 208624_s_at | eukaryotic translation initiation factor 4 gamma, 1 | EIF4G1 |
| 208683_at | calpain 2, (m/II) large subunit | CAPN2 |
| 208703_s_at | amyloid beta (A4) precursor-like protein 2 | APLP2 |
| 208771_s_at | leukotriene A4 hydrolase | LTA4H |
| 208892_s_at | dual specificity phosphatase 6 | DUSP6 |
| 208925_at | chromosome 3 open reading frame 4 | C3orf4 |
| 208949_s_at | lectin, galactoside-binding, soluble, 3 (galectin 3) | LGALS3 |
| 209043_at | 3′-phosphoadenosine 5′-phosphosulfate synthase 1 | PAPSS1 |
| 209058_at | endothelial differentiation-related factor 1 | EDF1 |
| 209094_at | dimethylarginine dimethylaminohydrolase 1 | DDAH1 |
| 209154_at | Tax interaction protein 1 | TIP-1 |
| 209179_s_at | leukocyte receptor cluster (LRC) member 4 | LENG4 |
| 209185_s_at | insulin receptor substrate 2 | IRS2 |
| 209250_at | degenerative spermatocyte homolog, lipid desaturase | DEGS |
| | (Drosophila) | |
| 209272_at | NGFI-A binding protein 1 (EGR1 binding protein 1) | NAB1 |
| 209288_s_at | CDC42 effector protein (Rho GTPase binding) 3 | CDC42EP3 |
| 209337_at | PC4 and SFRS1 interacting protein 2 | PSIP2 |
| 209396_s_at | chitinase 3-like 1 (cartilage glycoprotein-39) | CHI3L1 |
| 209407_s_at | deformed epidermal autoregulatory factor 1 | DEAF1 |
| | (Drosophila) | |
| 209413_at | UDP-Gal:betaGlcNAc beta 1,4-galactosyltransferase, | B4GALT2 |
| | polypeptide 2 | |
| 209457_at | dual specificity phosphatase 5 | DUSP5 |
| 209473_at | ectonucleoside triphosphate diphosphohydrolase 1 | ENTPD1 |
| 209503_s_at | proteasome (prosome, macropain) 26S subunit, | PSMC5 |
| | ATPase, 5 /// proteasome (prosome, macropain) 26S | |
| | subunit, ATPase, 5 | |
| 209575_at | interleukin 10 receptor, beta | IL10RB |
| 209585_s_at | multiple inositol polyphosphate histidine phosphatase, 1 | MINPP1 |
| 209585_s_at | multiple inositol polyphosphate histidine phosphatase, 1 | MINPP1 |
| 209666_s_at | conserved helix-loop-helix ubiquitous kinase | CHUK |
| 209714_s_at | cyclin-dependent kinase inhibitor 3 (CDK2-associated | CDKN3 |
| | dual specificity phosphatase) | |
| 209773_s_at | ribonucleotide reductase M2 polypeptide | RRM2 |
| 209798_at | nuclear protein, ataxia-telangiectasia locus | NPAT |
| 209906_at | complement component 3a receptor 1 | C3AR1 |
| 209930_s_at | nuclear factor (erythroid-derived 2), 45 kDa | NFE2 |
| 210555_s_at | nuclear factor of activated T-cells, cytoplasmic, | NFATC3 |
| | calcineurin-dependent 3 | |
| 210840_s_at | IQ motif containing GTPase activating protein 1 | IQGAP1 |
| 210845_s_at | plasminogen activator, urokinase receptor | PLAUR |
| 210942_s_at | alpha2,3-sialyltransferase | ST3GALVI |
| 210946_at | phosphatidic acid phosphatase type 2A | PPAP2A |
| 211004_s_at | aldehyde dehydrogenase 3 family, member B1 | ALDH3B1 |
| 211317_s_at | CASP8 and FADD-like apoptosis regulator | CFLAR |
| 211429_s_at | serine (or cysteine) proteinase inhibitor, clade A | SERPINA1 |
| | (alpha-1 antiproteinase, antitrypsin), member 1 | |
| 211506_s_at | interleukin 8 | IL8 |
| 212063_at | CD44 antigen (homing function and Indian blood | CD44 |
| | group system) | |
| 212223_at | iduronate 2-sulfatase (Hunter syndrome) | IDS |
| 212410_at | hypothetical protein FLJ34588 | FLJ34588 |
| 212481_s_at | tropomyosin 4 | TPM4 |
| 212588_at | protein tyrosine phosphatase, receptor type, C | PTPRC |
| 212657_s_at | interleukin 1 receptor antagonist | IL1RN |
| 212681_at | erythrocyte membrane protein band 4.1-like 3 | EPB41L3 |
| 212753_at | hypothetical protein MGC40413 | MGC40413 |
| 212990_at | synaptojanin 1 | SYNJ1 |
| 213164_at | mitochondrial ribosomal protein S6 | MRPS6 |
| 213253_at | SMC2 structural maintenance of chromosomes 2-like | SMC2L1 |
| | 1 (yeast) | |
| 213326_at | vesicle-associated membrane protein 1 | VAMP1 |
| | (synaptobrevin 1) | |
| 213373_s_at | caspase 8, apoptosis-related cysteine protease | CASP8 |
| 213457_at | malignant fibrous histiocytoma amplified sequence 1 | MFHAS1 |
| 213572_s_at | serine (or cysteine) proteinase inhibitor, clade B | SERPINB1 |
| | (ovalbumin), member 1 | |
| 213587_s_at | vacuolar proton-ATPase subunit | LOC155066 |
| 213650_at | golgin-67 | GOLGIN-67 |
| 213698_at | hypothetical protein MGC14276 | MGC14276 |
| 213791_at | proenkephalin | PENK |
| 213915_at | natural killer cell group 7 sequence | NKG7 |
| 213951_s_at | GT198, complete ORF | HUMGT198A |
| 214075_at | secreted protein of unknown function | SPUF |
| 214086_s_at | ADP-ribosyltransferase (NAD+; poly(ADP-ribose) | ADPRTL2 |
| | polymerase)-like 2 | |
| 214086_s_at | ADP-ribosyltransferase (NAD+; poly(ADP-ribose) | ADPRTL2 |
| | polymerase)-like 2 | |
| 214157_at | GNAS complex locus | GNAS |
| 214182_at | ADP-ribosylation factor 6 | ARF6 |
| 214467_at | G protein-coupled receptor 65 | GPR65 |
| 214684_at | MADS box transcription enhancer factor 2, | MEF2A |
| | polypeptide A (myocyte enhancer factor 2A) | |
| 214727_at | breast cancer 2, early onset | BRCA2 |
| 216250_s_at | leupaxin | LPXN |
| 216268_s_at | jagged 1 (Alagille syndrome) | JAG1 |
| 216521_s_at | — | — |
| 216598_s_at | chemokine (C-C motif) ligand 2 | CCL2 |
| 216950_s_at | FcRI b form (AA 1-344) [Homo sapiens], mRNA | — |
| | sequence | |
| 217028_at | chemokine (C—X—C motif) receptor 4 | CXCR4 |
| 217478_s_at | major histocompatibility complex, class II, DM alpha | HLA-DMA |
| 217738_at | pre-B-cell colony-enhancing factor | PBEF |
| 217762_s_at | RAB31, member RAS oncogene family | RAB31 |
| 217782_s_at | G protein pathway suppressor 1 | GPS1 |
| 217931_at | trinucleotide repeat containing 5 | TNRC5 |
| 217941_s_at | erbb2 interacting protein | ERBB2IP |
| 217967_s_at | chromosome 1 open reading frame 24 | C1orf24 |
| 218039_at | nucleolar protein ANKT | ANKT |
| 218061_at | male-enhanced antigen | MEA |
| 218084_x_at | FXYD domain containing ion transport regulator 5 | FXYD5 |
| 218111_s_at | cytidine monophosphate N-acetylneuraminic acid | CMAS |
| | synthetase | |
| 218111_s_at | cytidine monophosphate N-acetylneuraminic acid | CMAS |
| | synthetase | |
| 218212_s_at | molybdenum cofactor synthesis 2 | MOCS2 |
| 218224_at | paraneoplastic antigen MA1 | PNMA1 |
| 218224_at | paraneoplastic antigen MA1 | PNMA1 |
| 218263_s_at | transposon-derived Buster1 transposase-like protein | LOC58486 |
| 218276_s_at | WW45 protein | WW45 |
| 218276_s_at | salvador homolog 1 (Drosophila) | SAV1 |
| 218285_s_at | oxidoreductase UCPA | LOC56898 |
| 218327_s_at | synaptosomal-associated protein, 29 kDa | SNAP29 |
| 218384_at | calcium regulated heat stable protein 1, 24 kDa | CARHSP1 |
| 218662_s_at | chromosome condensation protein G | HCAP-G |
| 218718_at | platelet derived growth factor C | PDGFC |
| 218718_at | platelet derived growth factor C | PDGFC |
| 218767_at | XPMC2 prevents mitotic catastrophe 2 homolog | XPMC2H |
| | (Xenopus laevis) | |
| 218966_at | myosin 5C | MYO5C |
| 218983_at | complement C1r-like proteinase precursor, | LOC51279 |
| 219020_at | hypothetical protein FLJ14249 similar to HS1 binding | FLJ14249 |
| | protein 3 | |
| 219098_at | MYB binding protein (P160) 1a | MYBBP1A |
| 219148_at | T-LAK cell-originated protein kinase | TOPK |
| 219157_at | kelch-like 2, Mayven (Drosophila) | KLHL2 |
| 219161_s_at | chemokine-like factor 1 | CKLF1 |
| 219228_at | zinc finger protein 331; zinc finger protein 463 | ZNF361 |
| 219296_at | hypothetical protein similar to ankyrin repeat- | FLJ10852 |
| | containing priotein AKR1 | |
| 219373_at | dolichyl-phosphate mannosyltransferase polypeptide 3 | DPM3 |
| 219649_at | dolichyl-P-Glc:Man9GlcNAc2-PP- | ALG6 |
| | dolichylglucosyltransferase | |
| 219767_s_at | crystallin, zeta (quinone reductase)-like 1 | CRYZL1 |
| 219863_at | cyclin-E binding protein 1 | CEB1 |
| 219890_at | C-type (calcium dependent, carbohydrate-recognition | CLECSF5 |
| | domain) lectin, superfamily member 5 | |
| 220046_s_at | cyclin L ania-6a | LOC57018 |
| 220059_at | BCR downstream signaling 1 | BRDG1 |
| 220162_s_at | caspase recruitment domain family, member 9 | CARD9 |
| 220330_s_at | SAM domain, SH3 domain and nuclear localisation | SAMSN1 |
| | signals, 1 | |
| 220397_at | nuclear protein double minute 1 | MDM1 |
| 220740_s_at | solute carrier family 12 (potassium/chloride | SLC12A6 |
| | transporters), member 6 | |
| 221060_s_at | toll-like receptor 4 | TLR4 |
| 221156_x_at | cell cycle progression 8 protein | CPR8 |
| 221156_x_at | cell cycle progression 8 protein | CPR8 |
| 221158_at | chromosome 21 open reading frame 66 | C21orf66 |
| 221190_s_at | colon cancer-associated protein Mic1 | MIC1 |
| 221191_at | DKFZp434A0131 protein | DKFZP434A0131 |
| 221381_s_at | mortality factor 4 | MORF4 |
| 221563_at | dual specificity phosphatase 10 | DUSP10 |
| 221571_at | TNF receptor-associated factor 3 | TRAF3 |
| 221645_s_at | zinc finger protein 83 (HPF1) | ZNF83 |
| 221649_s_at | peter pan homolog (Drosophila) | PPAN |
| 221676_s_at | coronin, actin binding protein, 1C | CORO1C |
| 221830_at | RAP2A, member of RAS oncogene family | RAP2A |
| 221840_at | protein tyrosine phosphatase, receptor type, E | PTPRE |
| 221882_s_at | transmembrane protein 8 (five membrane-spanning | TMEM8 |
| | domains) | |
| 221989_at | ribosomal protein L10 | RPL10 |
| 222201_s_at | CASP8 associated protein 2 | CASP8AP2 |
| 37424_at | chromosome 6 open reading frame 18 | C6orf18 |
| 204655_at | chemokine (C-C motif) ligand 5 | CCL5 |
| 216598_s_at | chemokine (C-C motif) ligand 2 | CCL2 |
| 210946_at | phosphatidic acid phosphatase type 2A | PPAP2A |
| 211429_s_at | serine (or cysteine) proteinase inhibitor, clade A | SERPINA1 |
| | (alpha-1 antiproteinase, antitrypsin), member 1 | |
| 203140_at | B-cell CLL/lymphoma 6 (zinc finger protein 51) | BCL6 |
| 206157_at | pentaxin-related gene, rapidly induced by IL-1 beta | PTX3 |
| 204351_at | S100 calcium binding protein P | S100P |
| 205034_at | cyclin E2 | CCNE2 |
| 205681_at | BCL2-related protein A1 | BCL2A1 |
| 203455_s_at | spermidine/spermine N1-acetyltransferase | SAT |
| 211506_s_at | interleukin 8 | IL8 |
| 204961_s_at | neutrophil cytosolic factor 1 (47 kDa, chronic | NCF1 |
| | granulomatous disease, autosomal 1) | |
| 201426_s_at | vimentin | VIM |
| 209457_at | dual specificity phosphatase 5 | DUSP5 |
| 209906_at | complement component 3a receptor 1 | C3AR1 |
| 203388_at | arrestin, beta 2 | ARRB2 |
| 213915_at | natural killer cell group 7 sequence | NKG7 |
| 200660_at | S100 calcium binding protein A11 (calgizzarin) | S100A11 |
| 219890_at | C-type (calcium dependent, carbohydrate-recognition | CLECSF5 |
| | domain) lectin, superfamily member 5 | |
| 203303_at | H1 histone family, member X | H1FX |
| 202551_s_at | cysteine-rich motor neuron 1 | CRIM1 |
| 210942_s_at | alpha2,3-sialyltransferase | ST3GALVI |
| 202814_s_at | HMBA-inducible | HIS1 |
| 200904_at | major histocompatibility complex, class I, E | HLA-E |
| 205807_s_at | tuftelin 1 | TUFT1 |
| 207275_s_at | fatty-acid-Coenzyme A ligase, long-chain 1 | FACL1 |
| 204286_s_at | phorbol-12-myristate-13-acetate-induced protein 1 | PMAIP1 |
| 206643_at | histidine ammonia-lyase | HAL |
| 208107_s_at | exonuclease NEF-sp | LOC81691 |
| 217762_s_at | RAB31, member RAS oncogene family | RAB31 |
| 204174_at | arachidonate 5-lipoxygenase-activating protein | ALOX5AP |
| 214086_s_at | ADP-ribosyltransferase (NAD+; poly(ADP-ribose) | ADPRTL2 |
| | polymerase)-like 2 | |
| 201925_s_at | decay accelerating factor for complement (CD55, | DAF |
| | Cromer blood group system) | |
| 212223_at | Homo sapiens mRNA; cDNA DKFZp434G012 (from | — |
| | clone DKFZp434G012), mRNA sequence | |
| 203923_s_at | cytochrome b-245, beta polypeptide (chronic | CYBB |
| | granulomatous disease) | |
| 203409_at | damage-specific DNA binding protein 2, 48 kDa | DDB2 |
| 221830_at | RAP2A, member of RAS oncogene family | RAP2A |
| 205557_at | bactericidal/permeability-increasing protein | BPI |
| 209773_s_at | ribonucleotide reductase M2 polypeptide | RRM2 |
| 205098_at | chemokine (C-C motif) receptor 1 | CCR1 |
| 218224_at | paraneoplastic antigen MA1 | PNMA1 |
| 201710_at | v-myb myeloblastosis viral oncogene homolog | MYBL2 |
| | (avian)-like 2 | |
| 204614_at | serine (or cysteine) proteinase inhibitor, clade B | SERPINB2 |
| | (ovalbumin), member 2 | |
| 200618_at | LIM and SH3 protein 1 | LASP1 |
| 204116_at | interleukin 2 receptor, gamma (severe combined | IL2RG |
| | immunodeficiency) | |
| 204446_s_at | arachidonate 5-lipoxygenase | ALOX5 |
| 207610_s_at | egf-like module containing, mucin-like, hormone | EMR2 |
| | receptor-like sequence 2 | |
| 216950_s_at | FcRI b form (AA 1-344) [Homo sapiens], mRNA | — |
| | sequence | |
| 209473_at | ectonucleoside triphosphate diphosphohydrolase 1 | ENTPD1 |
| 207339_s_at | lymphotoxin beta (TNF superfamily, member 3) | LTB |
| 213622_at | collagen, type IX, alpha 2 | COL9A2 |
| 202393_s_at | TGFB inducible early growth response | TIEG |
| 209094_at | dimethylarginine dimethylaminohydrolase 1 | DDAH1 |
| 201963_at | fatty-acid-Coenzyme A ligase, long-chain 2 | FACL2 |
| 201850_at | capping protein (actin filament), gelsolin-like | CAPG |
| 206111_at | ribonuclease, RNase A family, 2 (liver, eosinophil- | RNASE2 |
| | derived neurotoxin) | |
| 204786_s_at | interferon (alpha, beta and omega) receptor 2 | IFNAR2 |
| 218384_at | calcium regulated heat stable protein 1, 24 kDa | CARHSP1 |
| 201012_at | annexin A1 | ANXA1 |
| 203535_at | S100 calcium binding protein A9 (calgranulin B) | S100A9 |
| 214727_at | breast cancer 2, early onset | BRCA2 |
| 202437_s_at | cytochrome P450, subfamily I (dioxin-inducible), | CYP1B1 |
| | polypeptide 1 (glaucoma 3, primary infantile) | |
| 210845_s_at | plasminogen activator, urokinase receptor | PLAUR |
| 213572_s_at | serine (or cysteine) proteinase inhibitor, clade B | SERPINB1 |
| | (ovalbumin), member 1 | |
| 201989_s_at | cAMP responsive element binding protein-like 2 | CREBL2 |
| 218662_s_at | chromosome condensation protein G | HCAP-G |
| 221882_s_at | transmembrane protein 8 (five membrane-spanning | TMEM8 |
| | domains) | |
| 206676_at | carcinoembryonic antigen-related cell adhesion | CEACAM8 |
| | molecule 8 | |
| 205229_s_at | coagulation factor C homolog, cochlin (Limulus | COCH |
| | polyphemus) | |
| 204971_at | cystatin A (stefin A) | CSTA |
| 216250_s_at | leupaxin | LPXN |
| 221156_x_at | cell cycle progression 8 protein | CPR8 |
| 203960_s_at | HSPCO34 protein | LOC51668 |
| 219157_at | kelch-like 2, Mayven (Drosophila) | KLHL2 |
| 202207_at | ADP-ribosylation factor-like 7 | ARL7 |
| 209396_s_at | chitinase 3-like 1 (cartilage glycoprotein-39) | CHI3L1 |
| 213164_at | Homo sapiens G21VN02 mRNA, mRNA sequence | — |
| 200962_at | Homo sapiens cDNA FLJ36224 fis, clone | — |
| | THYMU2000990, mRNA sequence | |
| 203046_s_at | timeless homolog (Drosophila) | TIMELESS |
| 205041_s_at | orosomucoid 1 | ORM1 |
| 203974_at | DNA segment, numerous copies, expressed probes | DXF68S1E |
| | (GS1 gene) | |
| 202811_at | associated molecule with the SH3 domain of STAM | AMSH |
| 202554_s_at | glutathione S-transferase M3 (brain) | GSTM3 |
| 207121_s_at | mitogen-activated protein kinase 6 | MAPK6 |
| 201999_s_at | t-complex-associated-testis-expressed 1-like 1 | TCTEL1 |
| 209301_at | carbonic anhydrase II | CA2 |
| 201034_at | adducin 3 (gamma) | ADD3 |
| 201471_s_at | sequestosome 1 | SQSTM1 |
| 203757_s_at | carcinoembryonic antigen-related cell adhesion | CEACAM6 |
| | molecule 6 (non-specific cross reacting antigen) | |
| 218145_at | chromosome 20 open reading frame 97 | C20orf97 |
| 204490_s_at | CD44 antigen (homing function and Indian blood | CD44 |
| | group system) | |
| 219494_at | RAD54B homolog | RAD54B |
| 218966_at | myosin 5C | MYO5C |
| 203761_at | Src-like-adaptor | SLA |
| 204561_x_at | apolipoprotein C-II | APOC2 |
| 217967_s_at | chromosome 1 open reading frame 24 | C1orf24 |
| 203344_s_at | retinoblastoma binding protein 8 | RBBP8 |
| 209154_at | Tax interaction protein 1 | TIP-1 |
| 205053_at | primase, polypeptide 1, 49 kDa | PRIM1 |
| 213698_at | Unknown (protein for MGC: 32701) [Homo sapiens], | — |
| | mRNA sequence | |
| 205260_s_at | acylphosphatase 1, erythrocyte (common) type | ACYP1 |
| 203370_s_at | enigma (LIM domain protein) | ENIGMA |
| 204220_at | glia maturation factor, gamma | GMFG |
| 203574_at | nuclear factor, interleukin 3 regulated | NFIL3 |
| 205070_at | inhibitor of growth family, member 3 | ING3 |
| 200788_s_at | phosphoprotein enriched in astrocytes 15 | PEA15 |
| 213587_s_at | vacuolar proton-ATPase subunit | LOC155066 |
| 204603_at | exonuclease 1 | EXO1 |
| 218061_at | male-enhanced antigen | MEA |
| 212501_at | CCAAT/enhancer binding protein (C/EBP), beta | CEBPB |
| 201628_s_at | Ras-related GTP-binding protein | RAGA |
| 212481_s_at | tropomyosin 4 | TPM4 |
| 217976_s_at | dynein, cytoplasmic, light intermediate polypeptide 1 | DNCLI1 |
| 203358_s_at | enhancer of zeste homolog 2 (Drosophila) | EZH2 |
| 207543_s_at | procollagen-proline, 2-oxoglutarate 4-dioxygenase | P4HA1 |
| | (proline 4-hydroxylase), alpha polypeptide I | |
| 205345_at | BRCA1 associated RING domain 1 | BARD1 |
| 206572_x_at | zinc finger protein 85 (HPF4, HTF1) | ZNF85 |
| 201422_at | interferon, gamma-inducible protein 30 | IFI30 |
| 200704_at | LPS-induced TNF-alpha factor | PIG7 |
| 209798_at | nuclear protein, ataxia-telangiectasia locus | NPAT |
| 209272_at | NGFI-A binding protein 1 (EGR1 binding protein 1) | NAB1 |
| 218212_s_at | molybdenum cofactor synthesis 2 | MOCS2 |
| 206734_at | jerky homolog-like (mouse) | JRKL |
| 213951_s_at | GT198, complete ORF | HUMGT198A |
| 208771_s_at | leukotriene A4 hydrolase | LTA4H |
| 202917_s_at | S100 calcium binding protein A8 (calgranulin A) | S100A8 |
| 202644_s_at | tumor necrosis factor, alpha-induced protein 3 | TNFAIP3 |
| 204887_s_at | serine/threonine kinase 18 | STK18 |
| 219296_at | hypothetical protein similar to ankyrin repeat- | FLJ10852 |
| | containing priotein AKR1 | |
| 202111_at | solute carrier family 4, anion exchanger, member 2 | SLC4A2 |
| | (erythrocyte membrane protein band 3-like 1) | |
| 205204_at | neuromedin B | NMB |
| 209930_s_at | nuclear factor (erythroid-derived 2), 45 kDa | NFE2 |
| 200931_s_at | vinculin | VCL |
| 208398_s_at | TBP-like 1 | TBPL1 |
| 204143_s_at | rTS beta protein | HSRTSBETA |
| 219649_at | dolichyl-P-Glc:Man9GlcNAc2-PP- | ALG6 |
| | dolichylglucosyltransferase | |
| 211004_s_at | aldehyde dehydrogenase 3 family, member B1 | ALDH3B1 |
| 219119_at | U6 snRNA-associated Sm-like protein LSm8 | LSM8 |
| 207008_at | interleukin 8 receptor, beta | IL8RB |
| 201612_at | aldehyde dehydrogenase 9 family, member A1 | ALDH9A1 |
| 210555_s_at | nuclear factor of activated T-cells, cytoplasmic, | NFATC3 |
| | calcineurin-dependent 3 | |
| 202679_at | Niemann-Pick disease, type C1 | NPC1 |
| 212410_at | hypothetical protein FLJ34588 | FLJ34588 |
| 220202_s_at | membrane-associated nucleic acid binding protein | MNAB |
| 37424_at | chromosome 6 open reading frame 18 | C6orf18 |
| 201097_s_at | ADP-ribosylation factor 4 | ARF4 |

### Gene Set 3

| Affymetrix_ID | Title | Gene Symbol |
|---|---|---|
| 204655_at | chemokine (C-C motif) ligand 5 | CCL5 |
| 206157_at | pentaxin-related gene, rapidly induced by IL-1 beta | PTX3 |
| 210946_at | phosphatidic acid phosphatase type 2A | PPAP2A |
| 212657_s_at | interleukin 1 receptor antagonist | IL1RN |
| 216598_s_at | chemokine (C-C motif) ligand 2 | CCL2 |
| 205681_at | BCL2-related protein A1 | BCL2A1 |
| 208949_s_at | lectin, galactoside-binding, soluble, 3 (galectin 3) | LGALS3 |
| 202769_at | Homo sapiens mRNA; cDNA DKFZp434B142 (from | — |
| | clone DKFZp434B142), mRNA sequence | |
| 211429_s_at | serine (or cysteine) proteinase inhibitor, clade A (alpha-1 | SERPINA1 |
| | antiproteinase, antitrypsin), member 1 | |
| 220397_at | nuclear protein double minute 1 | MDM1 |
| 201666_at | tissue inhibitor of metalloproteinase 1 (erythroid | TIMP1 |
| | potentiating activity, collagenase inhibitor) | |
| 205034_at | cyclin E2 | CCNE2 |
| 204614_at | serine (or cysteine) proteinase inhibitor, clade B | SERPINB2 |
| | (ovalbumin), member 2 | |
| 204351_at | S100 calcium binding protein P | S100P |
| 202551_s_at | cysteine-rich motor neuron 1 | CRIM1 |
| 212223_at | iduronate 2-sulfatase (Hunter syndrome) | IDS |
| 201426_s_at | vimentin | VIM |
| 209457_at | dual specificity phosphatase 5 | DUSP5 |
| 211506_s_at | interleukin 8 | IL8 |
| 219890_at | C-type (calcium dependent, carbohydrate-recognition | CLECSF5 |
| | domain) lectin, superfamily member 5 | |
| 203455_s_at | spermidine/spermine N1-acetyltransferase | SAT |
| 201925_s_at | decay accelerating factor for complement (CD55, | DAF |
| | Cromer blood group system) | |
| 207339_s_at | lymphotoxin beta (TNF superfamily, member 3) | LTB |
| 200660_at | S100 calcium binding protein A11 (calgizzarin) | S100A11 |
| 213915_at | natural killer cell group 7 sequence | NKG7 |
| 203303_at | H1 histone family, member X | H1FX |
| 205260_s_at | acylphosphatase 1, erythrocyte (common) type | ACYP1 |
| 204961_s_at | neutrophil cytosolic factor 1 (47 kDa, chronic | NCF1 |
| | granulomatous disease, autosomal 1) | |
| 207275_s_at | fatty-acid-Coenzyme A ligase, long-chain 1 | FACL1 |
| 205807_s_at | tuftelin 1 | TUFT1 |
| 202814_s_at | HMBA-inducible | HIS1 |
| 204759_at | chromosome condensation 1-like | CHC1L |
| 221840_at | protein tyrosine phosphatase, receptor type, E | PTPRE |
| 221156_x_at | cell cycle progression 8 protein | CPR8 |
| 204174_at | arachidonate 5-lipoxygenase-activating protein | ALOX5AP |
| 210942_s_at | alpha2,3-sialyltransferase | ST3GALVI |
| 217762_s_at | RAB31, member RAS oncogene family | RAB31 |
| 203923_s_at | cytochrome b-245, beta polypeptide (chronic | CYBB |
| | granulomatous disease) | |
| 204286_s_at | phorbol-12-myristate-13-acetate-induced protein 1 | PMAIP1 |
| 201502_s_at | nuclear factor of kappa light polypeptide gene enhancer | NFKBIA |
| | in B-cells inhibitor, alpha | |
| 209906_at | complement component 3a receptor 1 | C3AR1 |
| 209473_at | ectonucleoside triphosphate diphosphohydrolase 1 | ENTPD1 |
| 202191_s_at | growth arrest-specific 7 | GAS7 |
| 203535_at | S100 calcium binding protein A9 (calgranulin B) | S100A9 |
| 218983_at | complement C1r-like proteinase precursor, | LOC51279 |
| 206643_at | histidine ammonia-lyase | HAL |
| 201963_at | fatty-acid-Coenzyme A ligase, long-chain 2 | FACL2 |
| 200904_at | major histocompatibility complex, class I, E | HLA-E |
| 204162_at | highly expressed in cancer, rich in leucine heptad | HEC |
| | repeats | |
| 205098_at | chemokine (C-C motif) receptor 1 | CCR1 |
| 205557_at | bactericidal/permeability-increasing protein | BPI |
| 203388_at | arrestin, beta 2 | ARRB2 |
| 201590_x_at | annexin A2 | ANXA2 |
| 202207_at | ADP-ribosylation factor-like 7 | ARL7 |
| 214086_s_at | ADP-ribosyltransferase (NAD+; poly(ADP-ribose) | ADPRTL2 |
| | polymerase)-like 2 | |
| 213326_at | vesicle-associated membrane protein 1 (synaptobrevin | VAMP1 |
| | 1) | |
| 207563_s_at | O-linked N-acetylglucosamine (GlcNAc) transferase | OGT |
| | (UDP-N-acetylglucosamine:polypeptide-N- | |
| | acetylglucosaminyl transferase) | |
| 201034_at | adducin 3 (gamma) | ADD3 |
| 201999_s_at | t-complex-associated-testis-expressed 1-like 1 | TCTEL1 |
| 200962_at | Homo sapiens cDNA FLJ36224 fis, clone | — |
| | THYMU2000990, mRNA sequence | |
| 203706_s_at | frizzled homolog 7 (Drosophila) | FZD7 |
| 221830_at | RAP2A, member of RAS oncogene family | RAP2A |
| 216250_s_at | leupaxin | LPXN |
| 210845_s_at | plasminogen activator, urokinase receptor | PLAUR |
| 202437_s_at | cytochrome P450, subfamily I (dioxin-inducible), | CYP1B1 |
| | polypeptide 1 (glaucoma 3, primary infantile) | |
| 213951_s_at | GT198, complete ORF | HUMGT198A |
| 214727_at | breast cancer 2, early onset | BRCA2 |
| 213457_at | malignant fibrous histiocytoma amplified sequence 1 | MFHAS1 |
| 203409_at | damage-specific DNA binding protein 2, 48 kDa | DDB2 |
| 214467_at | G protein-coupled receptor 65 | GPR65 |
| 209396_s_at | chitinase 3-like 1 (cartilage glycoprotein-39) | CHI3L1 |
| 218224_at | paraneoplastic antigen MA1 | PNMA1 |
| 203574_at | nuclear factor, interleukin 3 regulated | NFIL3 |
| 201012_at | annexin A1 | ANXA1 |
| 202644_s_at | tumor necrosis factor, alpha-induced protein 3 | TNFAIP3 |
| 203757_s_at | carcinoembryonic antigen-related cell adhesion molecule | CEACAM6 |
| | 6 (non-specific cross reacting antigen) | |
| 218212_s_at | molybdenum cofactor synthesis 2 | MOCS2 |
| 206332_s_at | interferon, gamma-inducible protein 16 | IFI16 |
| 209585_s_at | multiple inositol polyphosphate histidine phosphatase, 1 | MINPP1 |
| 206676_at | carcinoembryonic antigen-related cell adhesion molecule 8 | CEACAM8 |
| 206734_at | jerky homolog-like (mouse) | JRKL |
| 219373_at | dolichyl-phosphate mannosyltransferase polypeptide 3 | DPM3 |
| 216950_s_at | FcRI b form (AA 1-344) [Homo sapiens], mRNA | — |
| | sequence | |
| 204446_s_at | arachidonate 5-lipoxygenase | ALOX5 |
| 205229_s_at | coagulation factor C homolog, cochlin (Limulus | COCH |
| | polyphemus) | |
| 200644_at | MARCKS-like protein | MLP |
| 203140_at | B-cell CLL/lymphoma 6 (zinc finger protein 51) | BCL6 |
| 219767_s_at | crystallin, zeta (quinone reductase)-like 1 | CRYZL1 |
| 218718_at | platelet derived growth factor C | PDGFC |
| 218276_s_at | WW45 protein | WW45 |
| 218111_s_at | cytidine monophosphate N-acetylneuraminic acid | CMAS |
| | synthetase | |
| 213253_at | SMC2 structural maintenance of chromosomes 2-like 1 | SMC2L1 |
| | (yeast) | |
| 209666_s_at | conserved helix-loop-helix ubiquitous kinase | CHUK |
| 206695_x_at | zinc finger protein 43 (HTF6) | ZNF43 |
| 205756_s_at | coagulation factor VIII, procoagulant component | F8 |
| | (hemophilia A) | |
| 205063_at | survival of motor neuron protein interacting protein 1 | SIP1 |
| 204742_s_at | androgen-induced proliferation inhibitor | APRIN |
| 204605_at | cell growth regulator with ring finger domain 1 | CGRRF1 |
| 202611_s_at | cofactor required for Sp1 transcriptional activation, | CRSP2 |
| | subunit 2, 150 kDa | |
| 202405_at | Homo sapiens cDNA FLJ43274 fis, clone | — |
| | KIDNE2008914 | |
| 201745_at | PTK9 protein tyrosine kinase 9 /// PTK9 protein tyrosine | PTK9 |
| | kinase 9 | |
| 201656_at | integrin, alpha 6 | ITGA6 |

[0159] All of the compositions and/or methods disclosed and claimed herein can be made and executed without undue experimentation in light of the present disclosure. While the compositions and methods of this invention have been described in terms of preferred embodiments, it will be apparent to those of skill in the art that variations may be applied to the compositions and/or methods and in the steps or in the sequence of steps of the method described herein without departing from the concept, spirit and scope of the invention. More specifically, it will be apparent that certain agents which are both chemically and physiologically related may be substituted for the agents described herein while the same or similar results would be achieved. All such similar substitutes and modifications apparent to those skilled in the art are deemed to be within the spirit, scope and concept of the invention as defined by the appended claims.

[0160] The references cited herein throughout, to the extent that they provide exemplary procedural or other details supplementary to those set forth herein, are all specifically incorporated herein by reference. Each of the tables, pages and figures of priority application No. 60/575,076 filed on May 27, 2004 are specifically incorporated by reference in their entirety. The following references are exemplary of the state of the art of the development and use of IMPDH inhibitors and are incorporated herein by reference in their entirety:

### REFERENCES

[0161] Albrecht W. Storck M, Pfetch E Martin W, Abendroth D (2000) Development and application of a high-performance liquid chromatography-based assay for determination of the activity of inosine 5′-monophosphate dehydrogenase in whole blood and isolated mononuclear cells. Ther Drug Monitoring 22: 283-294.
[0162] Allison, A C, Eugui, E M (2000) Mycophenolate mofetil and its mechanisms of action. Immunopharmacology 47: 85-118.
[0163] Budde K, Glander P, Bauer S, Braun K, Waiser J, Fritsche L, Mai I, Roots I, Neumayer H-H (2000) Pharmacodynamic monitoring of Mycophenolate Mofetil. Clin Chem Lab Med 38: 1213-1216.
[0164] Davis, G L, Esteban-Mur, R, Rustgi, V, Hoefs, J, Gordon, S C, Trepo, C, Shiffman, M L, Zeuzem, S, Craxi, A, Ling, M H, Albrecht, J (1998) Interferon alfa-2b alone or in combination with ribavirin for the treatment of relapse of chronic hepatitis C. International Hepatitis Interventional Therapy Group. N. Engl. J. Med 339: 1493-1499.
[0165] Daxecker H, Raab M, Cichna M, Markl P, Muller M M (2001) Determination of the effects of mycophenolic acid on the nucleotide pool of human peripheral blood mononuclear cells in vitro by high-performance liquid chromatography. Clin Chim Acta 310: 81-87.
[0166] Dayton J S, Lindsten T, Thompson C B, and Mitchell B S (1994) Effects of human T lymphocyte activation in inosine monophosphate dehyrogensase expression. J Immunol 152: 984-991.
[0167] Decker C J, Jain J, Almquist S J, Heiser A D, Nimmesgern E, Lyons S M, Shlyakhter D (2001) In vitro and in vivo characterization of novel non-nucleoside uncompetitive inhibitors of IMPDH. 11^{th} International Congress of Immunology, Stockholm, 22-27 Jul. 2001. Published as a supplement to the Scandinavian J of Immunol 54: suppl 1: July/August 2001.
[0168] Dhar T G M, Shen Z, Guo J, Liu C, Watterson S H, Gu H H, Pitts W J, Fleener C A, Rouleau K A, Sherbina N Z, McIntyre K W, Witmer M R, Tredup J A, Chen B-C, Zhao R, Bednarz M S, Cheney D L, MacMaster J F, Miller L M, Berry K K, Harper T W, Barrish J C, Hollenbaugh D L, Iwanowicz E J (2002) Discovery of N-[2-[2-[[3-Methoxy-4-(5-0xazolyl)phenyl]-amino]-5-oxazolyl]phenyl]-N-methyl-4-morpholineacetamide as a novel and potent inhibitor of inosine monophosphate dehydrogenase with excellent in vivo activity. J Med Chem 45: 2127-2130.
[0169] Eugui, E M, Almquist, S J, Muller C D, Allison, A C (1991a) Lymphocyte-selective cytostatic and immunosuppressive effects of mycophenolic acid in vitro: role of deoxyguanosine nucleotide depletion. Scan J Immunol 33: 161-173.
[0170] Eugui, E M, Mirkovich, A, Allison, A C (1991b) Lymphocyte-selective antiproliferative and immunosuppressive effect of mycophenolic acid in mice. Scand. J. Immunol 33: 175-183.
[0171] Fairbanks L D, Bofill M, Ruckemann K and Simmonds A H. 1995. Importance of ribonucleotide availability to proliferating T-lymphocytes from healthy humans. J Biol Chem 270: 29682-29689.
[0172] Franchetti P, and Grifantini M (1999) Nucleoside and non-nucleoside IMP dehydrogenase inhibitors as antitumor and antiviral agents. Curr Med Chem 6: 599-614.
[0173] Griesmacher A, Weigel G, Seebacher G, Muller M M (1997) IMP-dehydrogenase inhibition in human lymphocytes and lymphoblasts by mycophenolic acid and mycophenolic acid glucuronide. Clin Chem 43: 2312-2317.
[0174] Griesmacher A, Weigel G, Seebacher G, Mallinger R, Laufer G, Muller M W (1998). Inhibition of inosine monophosphate dehyrogensase activity by the plasma of heart transplant recipients receiving mycophenolate mofetil. Adv Exp Med Biol 431: 537-541
[0175] Gummert J F, Barten M J, Sherwood S W, Gelder T V, Morris R E (1999). Pharmacodynamics of immunosuppression by mycophenolic acid: inhibition of both lymphocyte proliferation and activation correlates with pharmacokinetics. J Pharmacol and Exp Ther 291: 1100-1112.
[0176] Heiser A, Bridson G, Leon E, Jones P, Badia M, Saunders J, Armistead D, Decker C, Chaturvedi P. 1996. Single dose mycophenolate mofetil and mycophenolic acid metabolism and disposition in bile duct-cannulated and intact rats. ISSX Proceedings, San Diego, Calif.: October, 1996.
[0177] Hirohata S and Yanagida T (1995). Inhibition of expression of cyclin A in human B cells by an immunosuppressant mizoribine. J Immunol 155: 5175-5183.
[0178] Ishikawa, H (1999) Mizoribine and mycophenolate mofetil. Curr Med Chem 6: 575-597.
[0179] Jain J, Almquist S J, Shlyakhter D, and Harding M W (2001) VX-497: a novel, selective IMPDH inhibitor and immunosuppressive agent. J Pharm Sci 90: 625-637.
[0180] Jain J, Almquist S J, Heiser A D, Shlyakhter D, Leon E, Memmott C, Moody C S, Nimmesgem E and Decker C (2002) Characterization of pharmacological efficacy of VX-148, a new, potent immunosuppressive inosine 5′-monophosphate dehydrogenase inhibitor. J Pharmacol Exp Ther 302: 1272-1277.
[0181] Jayaram H N, Grusch M, Cooney D A and Krupitza G. 1999. Consequences of IMP dehydrogenase inhibition, and its relationship to cancer and apoptosis. Curr Med Chem 6: 561-574.
[0182] Laliberte J, Yee A, Xiong Y and Mitchell B S (1998). Effects of guanine nucleotide depletion on cell cycle progression in human T lymphocytes. Blood 91: 2896-2904.:
[0183] Langman L J, LeGatt D F, Yatscoff R W 1995. Pharmacodynamic assessment of mycophenolic acid induced immunosuppression. Clin Chem 41: 295-299.
[0184] Langman L J, LeGatt D F, Halloran P F, Yatskoff R W 1996. Pharmacodynamic assessment of mycophenolic acid induced immunosuppression in renal transplant recipients. Transplantation 62: 666-672.
[0185] Markland, W, McQuaid, T J, Jain, J, Kwong, A D (2000) Broad-spectrum antiviral activity of the IMP dehydrogenase inhibitor VX-497: a comparison with ribavirin and demonstration of antiviral additivity with alpha interferon. Antimicrobial Agents Chemother 44: 859-866.
[0186] McHutchison, J G, Gordon, S C, Schiff, E R, Shiffman, M L, Lee, W M, Rustgi, V K, Goodman, Z D, Ling, M H, Cort, S, Albrecht, J K (1998) Interferon alfa-2b alone or in combination with ribavirin as initial treatment for chronic hepatitis C. Hepatitis Interventional Therapy Group. N Engl J Med 339: 1485-1492.
[0187] Mele T S and Halloran P F (2000) The use of mycophenolate mofetil in transplant recipients. Immunopharmacology 47: 215-245.
[0188] Millan O, Oppenheimer F, Brunet M, Vilardell J, Rojo I, Vives J, Martorell J (2000). Assessment of mycophenolic acid-induced immunosuppression: a new approach. Clin Chem 46: 1376-1383.
[0189] Montero C, Duley J A, Fairbanks L D, McBride M B, Micheli V, Cant A J, Morgan G. 1995. Demonstration of induction of erythrocyte inosine monophosphate dehydrogenase activity in ribavirin-treated patients using a high performance liquid chromatography linked method. Clin Chim Acta 238: 169-178.
[0190] Poynard, T, Marcellin, P, Lee, S S, Niederau, C, Minuk, G S, Ideo, G, Bain, V, Heathcote, J, Zeuzem, S, Trepo, C, Albrecht, J K (1998) Randomised trial of interferon alpha2b plus ribavirin for 48 weeks or for 24 weeks versus interferon alpha2b plus placebo for 48 weeks for treatment of chronic infection with hepatitis C virus. International Hepatitis Interventional Therapy Group. Lancet 352: 1426-1432.
[0191] Qiu Y, Fairbanks L D, Ruckemann K, Hawrylowicz C M, Richards D F, Kirschbaum B, Simmonds H A. 2000. Mycophenolic acid-induced GTP depletion also affects ATP and pyrimidine synthesis in mitogen-stimulated primary human T-lymphocytes. Transplantation 69: 890-897.
[0192] Sanquer S, Breil M, Baron C, Dhamane D, Astier A, Lang P (1999) Induction of inosine monophosphate dehydrogenase activity after long-term treatment with mycophenolate mofetil. Clin Pharmacol Ther 65: 640-664.
[0193] Saunders J O and Raybuck S A. 2000. Inosine monophosphate dehydrogenase: consideration of structure, kinetics, and therapeutic potential. Ann Reports in Med Chem 35: 201-210.
[0194] Sintchak, M D, Fleming, M A, Futer, O, Raybuck, S A, Chambers, S P, Caron, P R, Murcko, M A, Wilson, K P (1996) Structure and mechanism of inosine monophosphate dehydrogenase in complex with the immunosuppressant Mycophenolic acid. Cell 85: 921-930.
[0195] Sintchak M D and Nimmesgem E (2000) The structure of inosine 5′-monophosphate dehydrogenase and the design of novel inhibitors. Immunopharmacology 47: 163-184.
[0196] Thomson A W, Woo J, Yao G Z, Todo S, Starzl T E, Zeevi A. 1993 Effect of combined administration of FK506 and the purine biosynthesis inhibitors mizoribine or mycophenolic acid on lymphocyte DNA synthesis and T cell activation molecule expression in human mixed lymphocyte cultures. Transplant Immunology 1: 146-150.
[0197] Weaver J L, Pine P S and Aszalos A. 1991 Comparison of the in vitro and biophysical effects of cyclosporin A, FK-506, and mycophenolic acid on human peripheral blood lymphocytes. Immunopharmacology and Immunotoxicology 13: 563-576.

TABLE IX

| Gene Name | Gene Description | Target Description | Gene Symbol | Change_24 h | Change_48 h | Change_72 h |
|---|---|---|---|---|---|---|
| 201110_s_at | thrombospondin 1 | gb: NM_003246.1 /DEF = Homo sapiens | THBS1 | 1.9 | 86.1 | 61.4 |
| | | thrombospondin 1 (THBS1), mRNA. /FEA = mRNA | | | | |
| | | /GEN = THBS1 /PROD = thrombospondin 1 | | | | |
| | | /DB_XREF = gi: 4507484 /UG = Hs.87409 | | | | |
| | | thrombospondin 1 /FL = gb: NM_003246.1 | | | | |
| 206618_at | interleukin 18 receptor 1 | gb: NM_003855.1 /DEF = Homo sapiens interleukin | IL18R1 | 1.5 | 1.3 | 1.0 |
| | | 18 receptor 1 (IL18R1), mRNA. /FEA = mRNA | | | | |
| | | /GEN = IL18R1 /PROD = interleukin 18 receptor 1 | | | | |
| | | /DB_XREF = gi: 4504654 /UG = Hs.159301 | | | | |
| | | interleukin 18 receptor 1 /FL = gb: U43672.1 | | | | |
| | | gb: NM_003855.1 | | | | |
| 212224_at | aldehyde dehydrogenase 1 family, m [symbol] | Consensus includes gb: NM_000689.1 | ALDH1A1 | 1.0 | −1.8 | −1.8 |
| | | /DEF = Homo sapiens aldehyde dehydrogenase 1, | | | | |
| | | soluble (ALDH1), mRNA. /FEA = CDS | | | | |
| | | /GEN = ALDH1 /PROD = aldehyde dehydrogenase | | | | |
| | | 1, soluble /DB_XREF = gi: 4502030 /UG = Hs.76392 | | | | |
| | | aldehyde dehydrogenase 1 family, member A1 | | | | |
| | | /FL = gb: AF003341.1 gb: NM_000689.1 | | | | |
| 202953_at | complement component 1, q subcom [symbol] | gb: NM_000491.2 /DEF = Homo sapiens | C1QB | 1.0 | −1.4 | −1.5 |
| | | complement component 1, q subcomponent, beta | | | | |
| | | polypeptide (C1QB), mRNA. /FEA = mRNA | | | | |
| | | /GEN = C1QB /PROD = complement component 1, | | | | |
| | | q subcomponent, betapolypeptide precursor | | | | |
| | | /DB_XREF = gi: 11038661 /UG = Hs.8986 | | | | |
| | | complement component 1, q subcomponent, beta | | | | |
| | | polypeptide /FL = gb: NM_000491.2 | | | | |
| 209396_s_at | chitinase 3-like 1 (cartilage glycoprot [symbol] | gb: M80927.1 /DEF = Human glycoprotein mRNA, | CHI3L1 | 1.0 | −1.4 | −1.7 |
| | | complete cds. /FEA = mRNA /PROD = glycoprotein | | | | |
| | | /DB_XREF = gi: 348911 /UG = Hs.75184 chitinase 3-like 1 (cartilage | | | | |
| | | glycoprotein-39) /FL = gb: M80927.1 | | | | |
| | | gb: NM_001276.1 | | | | |
| 220059_at | BCR downstream signaling 1 | gb: NM_012108.1 /DEF = Homo sapiens BCR | BRDG1 | 123.9 | −1.5 | −1.1 |
| | | downstream signaling 1 (BRDG1), mRNA. | | | | |
| | | /FEA = mRNA /GEN = BRDG1 /PROD = BCR | | | | |
| | | downstream signaling 1 /DB_XREF = gi: 6912271 | | | | |
| | | /UG = Hs.121128 BCR downstream signaling 1 | | | | |
| | | /FL = gb: AB023483.1 gb: NM_012108.1 | | | | |
| 206133_at | XIAP associated factor 1.0 | gb: NM_017523.1 /DEF = Homo sapiens XIAP | HSXIAPAF1 | 1.4 | −2.4 | 1.4 |
| | | associated factor1.0 (HSXIAPAF1), mRNA. | | | | |
| | | /FEA = mRNA /GEN = HSXIAPAF1 /PROD = XIAP | | | | |
| | | associated factor1.0 /DB_XREF = gi: 8923794 | | | | |
| | | /UG = Hs.139262 XIAP associated factor1.0 | | | | |
| | | /FL = gb: NM_017523.1 | | | | |
| 212628_at | protein kinase N2 | Consensus includes gb: BG292065 /FEA = EST | PKN2 | 1.6 | −1.6 | −1.3 |
| | | /DB_XREF = gi: 13050507 | | | | |
| | | /DB_XREF = est: 602386350F1 | | | | |
| | | /CLONE = IMAGE: 4515036 /UG = Hs.69171 protein | | | | |
| | | kinase C-like 2 | | | | |
| 203595_s_at | interferon-induced protein with tetratr [symbol] | Consensus includes gb: N47725 /FEA = EST | IFIT5 | 1.5 | −2.2 | 1.0 |
| | | /DB_XREF = gi: 1188891 | | | | |
| | | /DB_XREF = est: yy92h11.s1 | | | | |
| | | /CLONE = IMAGE: 281061 /UG = Hs.27610 retinoic | | | | |
| | | acid- and interferon-inducible protein (58 kD) | | | | |
| | | /FL = gb: U34605.1 gb: NM_012420.1 | | | | |
| 205692_s_at | CD38 antigen (p45) | gb: NM_001775.1 /DEF = Homo sapiens CD38 | CD38 | 1.7 | −2.1 | −1.2 |
| | | antigen (p45) (CD38), mRNA. /FEA = mRNA | | | | |
| | | /GEN = CD38 /PROD = CD38 antigen (p45) | | | | |
| | | /DB_XREF = gi: 4502664 /UG = Hs.66052 CD38 | | | | |
| | | antigen (p45) /FL = gb: D84276.1 gb: NM_001775.1 | | | | |
| | | gb: M34461.1 | | | | |
| 201707_at | peroxisomal biogenesis factor 19 | gb: NM_002857.1 /DEF = Homo sapiens | PEX19 | 90.1 | −1.5 | −1.5 |
| | | peroxisomal famesylated protein (PXF), mRNA. | | | | |
| | | /FEA = mRNA /GEN = PXF /PROD = peroxisomal | | | | |
| | | famesylated protein /DB_XREF = gi: 4506338 | | | | |
| | | /UG = Hs.168670 peroxisomal famesylated protein | | | | |
| | | /FL = gb: BC000496.1 gb: NM_002857.1 | | | | |
| | | gb: AB018541.1 | | | | |
| 205033_s_at | defensin, alpha 1, myeloid-related se [symbol] | gb: NM_004084.2 /DEF = Homo sapiens defensin, | DEFA1 | 1.2 | 1.6 | −1.8 |
| | | alpha 1, myeloid-related sequence (DEFA1), | | | | |
| | | mRNA. /FEA = mRNA /GEN = DEFA1 | | | | |
| | | /PROD = defensin, alpha 1, preproprotein | | | | |
| | | /DB_XREF = gi: 12621915 /UG = Hs.274463 | | | | |
| | | defensin, alpha 1, myeloid-related sequence | | | | |
| | | /FL = gb: NM_004084.2 gb: M21130.1 gb: M26602.1 | | | | |
| 33132_at | cleavage and polyadenylation specifi [symbol] | Cluster Incl. U37012: Human cleavage and | CPSF1 | 1.0 | 1.8 | 1.2 |
| | | polyadenylation specificity factor mRNA, complete | | | | |
| | | cds /cds = (51,4379) /gb = U37012 /gi = 1045573 | | | | |
| | | /ug = Hs.83727 /len = 4463 | | | | |
| 211330_s_at | hemochromatosis | gb: AF144242.1 /DEF = Homo sapiens | HFE | 1.1 | −1.1 | 82.1 |
| | | hemochromatosis splice variant delE3 mRNA. | | | | |
| | | complete cds. /FEA = mRNA /GEN = HFE | | | | |
| | | /PROD = hemochromatosis splice variant delE3 | | | | |
| | | /DB_XREF = gi: 11094324 /UG = Hs.20019 | | | | |
| | | hemochromatosis /FL = gb: AF144242.1 | | | | |
| 204439_at | chromosome 1 open reading frame 2 | gb: NM_006820.1 /DEF = Homo sapiens | C1orf29 | 1.0 | −894.0 | 2.2 |
| | | hypothetical protein, expressed in osteoblast | | | | |
| | | (GS3686), mRNA. /FEA = mRNA /GEN = GS3686 | | | | |
| | | /PROD = hypothetical protein, expressed in | | | | |
| | | osteoblast /DB_XREF = gi: 5803026 /UG = Hs.75470 hypothetical | | | | |
| | | protein, expressed in osteoblast | | | | |
| | | /FL = gb: AB000115.1 gb: NM_006820.1 | | | | |
| 206632_s_at | apolipoprotein B mRNA editing enzy [symbol] | gb: NM_004900.1 /DEF = Homo sapiens phorbolin | APOBEC3B | 1.0 | −113.2 | 1.2 |
| | | (similar to apolipoprotein B mRNA editing protein) | | | | |
| | | (DJ742C19.2), mRNA. /FEA = mRNA | | | | |
| | | /GEN = DJ742C19.2 /PROD = phorbolin (similar to | | | | |
| | | apolipoprotein B mRNAediting protein) | | | | |
| | | /DB_XREF = gi: 4758159 /UG = Hs.226307 phorbolin (similar to | | | | |
| | | apolipoprotein B mRNA editing protein) | | | | |
| | | /FL = gb: U61083.1 gb: NM_004900.1 | | | | |
| 202411_at | interferon, alpha-inducible protein 27 | gb: NM_005532.1 /DEF = Homo sapiens interferon, | IFI27 | 1.0 | −120.6 | 1.2 |
| | | alpha-inducible protein 27 (IFI27), mRNA. | | | | |
| | | /FEA = mRNA /GEN = IFI27 /PROD = interferon, | | | | |
| | | alpha-inducible protein 27 /DB_XREF = gi: 5031780 | | | | |
| | | /UG = Hs.278613 interferon, alpha-inducible protein | | | | |
| | | 27 /FL = gb: NM_005532.1 | | | | |
| 219211_at | ubiquitin specific protease 18 | gb: NM_017414.1 /DEF = Homo sapiens ubiquitin | USP18 | 1.0 | −183.7 | 1.0 |
| | | specific protease 18 (USP18), mRNA. | | | | |
| | | /FEA = mRNA /GEN = USP18 /PROD = ubiquitin | | | | |
| | | specific protease 18 /DB_XREF = gi: 8394518 | | | | |
| | | /UG = Hs.38260 ubiquitin specific protease 18 | | | | |
| | | /FL = gb: AL136690.1 gb: AF176642.2 | | | | |
| | | gb: NM_017414.1 | | | | |
| 203153_at | interferon-induced protein with tetratr [symbol] | gb: NM_001548.1 /DEF = Homo sapiens interferon- | | 1.0 | −1084.5 | 1.0 |
| | | induced protein with tetratricopeptide repeats 1 | | | | |
| | | (IFIT1), mRNA. /FEA = mRNA /GEN = IFIT1 | | | | |
| | | /PROD = interferon-induced protein | | | | |
| | | withtetratricopeptide repeats 1 | | | | |
| | | /DB_XREF = gi: 4504584 /UG = Hs.20315 interferon-induced protein with | | | | |
| | | tetratricopeptide repeats 1 /FL = gb: M24594.1 gb: NM_001548.1 | | | | |
| 203167_at | tissue inhibitor of metalloproteinase 2 [symbol] | gb: NM_003255.2 /DEF = Homo sapiens tissue | TIMP2 | 1.2 | −1.9 | 1.1 |
| | | inhibitor of metalloproteinase 2 (TIMP2), mRNA. | | | | |
| | | /FEA = mRNA /GEN = TIMP2 /PROD = tissue | | | | |
| | | inhibitor of metalloproteinase 2precursor | | | | |
| | | /DB_XREF = gi: 9257247 /UG = Hs.325495 tissue | | | | |
| | | inhibitor of metalloproteinase 2 /FL = gb: M32304.1 | | | | |
| | | gb: J05593.1 gb: NM_003255.2 | | | | |
| 202086_at | myxovirus (influenza virus) resistance [symbol] | gb: NM_002462.1 /DEF = Homo sapiens myxovirus | MX1 | 1.1 | −7.3 | −1.2 |
| | | (influenza) resistance 1, homolog of murine | | | | |
| | | (interferon-inducible protein p78) (MX1), mRNA. | | | | |
| | | /FEA = mRNA /GEN = MX1 /PROD = myxovirus | | | | |
| | | (influenza) resistance 1, homolog ofmurine | | | | |
| | | (interferon-inducible protein p78) | | | | |
| | | /DB_XREF = gi: 4505290 /UG = Hs.76391 myxovirus | | | | |
| | | (influenza) resistance 1, homolog of murine | | | | |
| | | (interferon-inducible protein p78) | | | | |
| | | /FL = gb: M30817.1 gb: M33882.1 gb: NM_002462.1 | | | | |
| 214038_at | chemokine (C-C motif) ligand 8 | Consensus includes gb: AI984980 /FEA = EST | CCL8 | 1.1 | −8.4 | −1.2 |
| | | /DB_XREF = gi: 5812257 | | | | |
| | | /DB_XREF = est: wr88g11.x1 | | | | |
| | | /CLONE = IMAGE: 2494820 /UG = Hs.271387 small | | | | |
| | | inducible cytokine subfamily A (Cys-Cys), member | | | | |
| | | 8 (monocyte chemotactic protein 2) | | | | |
| | | /FL = gb: NM_005623.1 | | | | |
| 208436_s_at | interferon regulatory factor 7 | gb: NM_004030.1 /DEF = Homo sapiens interferon | IRF7 | 1.0 | −2.8 | 1.1 |
| | | regulatory factor 7 (IRF7), transcript variant c, | | | | |
| | | mRNA. /FEA = mRNA /GEN = IRF7 | | | | |
| | | /PROD = interferon regulatory factor 7, | | | | |
| | | transcriptvariant c /DB_XREF = gi: 4809285 | | | | |
| | | /UG = Hs.166120 interferon regulatory factor 7 | | | | |
| | | /FL = gb: NM_004030.1 | | | | |
| 218400_at | 2′-5′-oligoadenylate synthetase 3, 10 [symbol] | gb: NM_006187.1 /DEF = Homo sapiens 2- | OAS3 | −1.1 | −3.1 | −1.2 |
| | | 5oligoadenylate synthetase 3 (OAS3), mRNA. | | | | |
| | | /FEA = mRNA /GEN = OAS3 /PROD = 2- | | | | |
| | | 5oligoadenylate synthetase 3 | | | | |
| | | /DB_XREF = gi: 5453623 /UG = Hs.56009 2- | | | | |
| | | 5oligoadenylate synthetase 3 /FL = gb: AB044545.1 | | | | |
| | | gb: AF063613.1 gb: NM_006187.1 | | | | |
| 44673_at | sialoadhesin | Cluster Incl. N53555: yv43e09.s1 Homo sapiens | SN | −1.1 | −3.0 | 1.0 |
| | | cDNA, 3 end /clone = IMAGE-245512 | | | | |
| | | /clone_end = 3′ /gb = N53555 /gi = 1194721 | | | | |
| | | /ug = Hs.31869 /len = 680 | | | | |
| 214453_s_at | interferon-induced protein 44 | Consensus includes gb: NM_006417.1 | IFI44 | 1.4 | −4.9 | 1.1 |
| | | /DEF = Homo sapiens interferon-induced, hepatitis | | | | |
| | | C-associated microtubular aggregate protein | | | | |
| | | (44 kD) (MTAP44), mRNA. /FEA = CDS | | | | |
| | | /GEN = MTAP44 /PROD = interferon-induced, | | | | |
| | | hepatitis C-associatedmicrotubular aggregate | | | | |
| | | protein (44 kD) /DB_XREF = gi: 5453743 | | | | |
| | | /UG = Hs.82316 interferon-induced, hepatitis C- | | | | |
| | | associated microtubular aggregate protein (44 kD) | | | | |
| | | /FL = gb: NM_006417.1 | | | | |
| 204994_at | myxovirus (influenza virus) resistance [symbol] | gb: NM_002463.1 /DEF = Homo sapiens myxovirus | MX2 | 1.0 | −2.8 | 1.1 |
| | | (influenza) resistance 2, homolog of murine | | | | |
| | | (MX2), mRNA. /FEA = mRNA /GEN = MX2 | | | | |
| | | /PROD = myxovirus (influenza) resistance 2, | | | | |
| | | homolog ofmurine /DB_XREF = gi: 11342663 | | | | |
| | | /UG = Hs.926 myxovirus (influenza) resistance 2, | | | | |
| | | homolog of murine /FL = gb: NM_002463.1 | | | | |
| | | gb: M30818.1 gb: M33883.1 | | | | |
| 202446_s_at | phospholipid scramblase 1 | Consensus includes gb: AI825926 /FEA = EST | PLSCR1 | 1.3 | −2.5 | −1.1 |
| | | /DB_XREF = gi: 5446597 | | | | |
| | | /DB_XREF = est: to92d05.x1 | | | | |
| | | /CLONE = IMAGE: 2185737 /UG = Hs.198282 | | | | |
| | | phospholipid scramblase 1 /FL = gb: NM_021105.1 | | | | |
| | | gb: AB006746.1 gb: AF098642.1 | | | | |
| 219863_at | hect domain and RLD 5 | gb: NM_016323.1 /DEF = Homo sapiens cyclin-E | HERC5 | 1.2 | −3.6 | −1.2 |
| | | binding protein 1 (LOC51191), mRNA. | | | | |
| | | /FEA = mRNA /GEN = LOC51191 /PROD = cyclin-E | | | | |
| | | binding protein 1 /DB_XREF = gi: 7705930 | | | | |
| | | /UG = Hs.26663 cyclin-E binding protein 1 | | | | |
| | | /FL = gb: AB027289.1 gb: NM_016323.1 | | | | |
| 204415_at | interferon, alpha-inducible protein (cl [symbol] | gb: NM_022873.1 /DEF = Homo sapiens interferon, | G1P3 | −1.1 | −3.5 | 1.4 |
| | | alpha-inducible protein (clone IFI-61.06) (G1P3), | | | | |
| | | transcript variant 3, mRNA. /FEA = mRNA | | | | |
| | | /GEN = G1P3 /PROD = interferon induced 61.06 | | | | |
| | | protein, isoform, c /DB_XREF = gi: 13259549 | | | | |
| | | /UG = Hs.265827 interferon, alpha-inducible protein | | | | |
| | | (clone IFI-61.06) /FL = gb: NM_022872.1 | | | | |
| | | gb: NM_022873.1 gb: NM_002038.2 | | | | |
| 205483_s_at | interferon, alpha-inducible protein (cl [symbol] | gb: NM_005101.1 /DEF = Homo sapiens interferon- | G1P2 | 1.0 | −9.9 | −1.1 |
| | | stimulated protein, 15 kDa (ISG15), mRNA. | | | | |
| | | /FEA = mRNA /GEN = ISG15 /PROD = interferon- | | | | |
| | | stimulated protein, 15 kDa/DB_XREF = gi: 4826773 | | | | |
| | | /UG = Hs.833 interferon-stimulated protein, 15 kDa | | | | |
| | | /FL = gb: M13755.1 gb: NM_005101.1 | | | | |
| 210001_s_at | suppressor of cytokine signaling 1 | gb: AB005043.1 /DEF = Homo sapiens mRNA for | SOCS1 | 1.1 | −1.7 | −2.7 |
| | | STAT induced STAT inhibitor1.0, complete cds. | | | | |
| | | /FEA = mRNA /PROD = STAT induced STAT | | | | |
| | | inhibitor1.0 /DB_XREF = gi: 2443364 | | | | |
| | | /UG = Hs.50640 JAK binding protein | | | | |
| | | /FL = gb: U88326.1 gb: AB005043.1 gb: AB000734.1 | | | | |
| | | gb: NM_003745.1 | | | | |
| 209196_at | chromosome 6 open reading frame 1 | gb: BC000388.1 /DEF = Homo sapiens, BING4, | C6orf11 | 1.3 | −1.3 | −65.8 |
| | | clone MGC: 8435, mRNA, complete cds. | | | | |
| | | /FEA = mRNA /PROD = BING4 | | | | |
| | | /DB_XREF = gi: 12653238 /UG = Hs.17930 | | | | |
| | | chromosome 6 open reading frame 11 | | | | |
| | | /FL = gb: BC000388.1 gb: NM_005452.2 | | | | |
| 206407_s_at | chemokine (C-C motif) ligand 13 | gb: NM_005408.1 /DEF = Homo sapiens small | CCL13 | 1.0 | −2.9 | −2.1 |
| | | inducible cytokine subfamily A (Cys-Cys), member | | | | |
| | | 13 (SCYA13), mRNA. /FEA = mRNA | | | | |
| | | /GEN = SCYA13 /PROD = small inducible cytokine | | | | |
| | | subfamily A (Cys-Cys), member 13 | | | | |
| | | /DB_XREF = gi: 4885586 /UG = Hs.11383 small | | | | |
| | | inducible cytokine subfamily A (Cys-Cys), member | | | | |
| | | 13 /FL = gb: U46767.1 gb: U59808.1 | | | | |
| | | gb: NM_005408.1 | | | | |
| 216598_s_at | chemokine (C-C motif) ligand 2 | Consensus includes gb: S69738.1 | CCL2 | −1.3 | −3.1 | −2.4 |
| | | /DEF = MCP1.0 = monocyte chemotactic protein | | | | |
| | | human, aortic endothelial cells, mRNA, 661 nt. | | | | |
| | | /FEA = mRNA /GEN = MCP1.0 /PROD = MCP1.0 | | | | |
| | | /DB_XREF = gi: 545464 /UG = Hs.303649 small | | | | |
| | | inducible cytokine A2 (monocyte chemotactic | | | | |
| | | protein 1, homologous to mouse Sig-je) | | | | |
| 212657_s_at | interleukin 1 receptor antagonist | Consensus includes gb: U65590 /DEF = Homo | IL1RN | −1.2 | −2.6 | −3.0 |
| | | sapiens IL1.0 receptor antagonist IL1.0Ra | | | | |
| | | (IL1.0RN) gene, alternatively spliced forms, | | | | |
| | | complete cds /FEA = mRNA_2 | | | | |
| | | /DB_XREF = gi: 2707374 /UG = Hs.81134 interleukin | | | | |
| | | 1 receptor antagonist | | | | |
| 204533_at | chemokine (C—X—C motif) ligand 10 | gb: NM_001565.1 /DEF = Homo sapiens small | CXCL10 | −1.2 | −4.9 | −3.9 |
| | | inducible cytokine subfamily B (Cys-X-Cys), | | | | |
| | | member 10 (SCYB10), mRNA. /FEA = mRNA | | | | |
| | | /GEN = SCYB10 /PROD = interferon gamma- | | | | |
| | | induced precursor /DB_XREF = gi: 4504700 | | | | |
| | | /UG = Hs.2248 small inducible cytokine subfamily B | | | | |
| | | (Cys-X-Cys), member 10 /FL = gb: NM_001565.1 | | | | |
| 203915_at | chemokine (C—X—C motif) ligand 9 | gb: NM_002416.1 /DEF = Homo sapiens monokine | CXCL9 | −1.2 | −1.7 | −3.2 |
| | | induced by gamma interferon (MIG), mRNA. | | | | |
| | | /FEA = mRNA /GEN = MIG /PROD = monokine | | | | |
| | | induced by gamma interferon | | | | |
| | | /DB_XREF = gi: 4505186 /UG = Hs.77367 monokine induced by gamma interferon | | | | |
| | | /FL = gb: NM_002416.1 | | | | |
| 209396_s_at | chitinase 3-like 1 (cartilage glycoprotei [symbol] | gb: M80927.1 /DEF = Human glycoprotein | CHI3L1 | 1.0 | −1.4 | −1.7 |
| | | mRNA, complete cds. /FEA = mRNA | | | | |
| | | /PROD = glycoprotein | | | | |
| | | /DB_XREF = gi: 348911 /UG = Hs.75184 | | | | |
| | | chitinase 3-like 1 (cartilage glycoprotein- | | | | |
| | | 39) /FL = gb: M80927.1 gb: NM_001276.1 | | | | |
| 212657_s_at | interleukin 1 receptor antagonist | Consensus includes gb: U65590 | IL1RN | −1.2 | −2.6 | −3.0 |
| | | /DEF = Homo sapiens IL-1 receptor | | | | |
| | | antagonist IL-1Ra (IL-1RN) gene, | | | | |
| | | alternatively spliced forms, complete cds | | | | |
| | | /FEA = mRNA_2 /DB_XREF = gi: 2707374 | | | | |
| | | /UG = Hs.81134 interleukin 1 receptor | | | | |
| | | antagonist | | | | |
| 209396_s_at | chitinase 3-like 1 (c [symbol] | gb: M80927.1 /DEF = Human | CHI3L1 | 1.0 | −1.4 | −1.7 |
| | | glycoprotein mRNA, complete cds. | | | | |
| | | /FEA = mRNA /PROD = glycoprotein | | | | |
| | | /DB_XREF = gi: 348911 /UG = Hs.75184 | | | | |
| | | chitinase 3-like 1 (cartilage | | | | |
| | | glycoprotein-39) /FL = gb: M80927.1 | | | | |
| | | gb: NM_001276.1 | | | | |
| 212657_s_at | interleukin 1 recept [symbol] | Consensus includes gb: U65590 | IL1RN | −1.2 | −2.6 | −3.0 |
| | | /DEF = Homo sapiens IL-1 receptor | | | | |
| | | antagonist IL-1Ra (IL-1RN) gene, | | | | |
| | | alternatively spliced forms, complete | | | | |
| | | cds /FEA = mRNA_2 | | | | |
| | | /DB_XREF = gi: 2707374 /UG = Hs.81134 | | | | |
| | | interleukin 1 receptor antagonist | | | | |
| 219494_at | RAD54 homolog B | gb: NM_012415.1 /DEF = Homo sapiens | RAD54B | 1.0 | 1.0 | 1.0 |
| | (S. cerevisiae) | RAD54, S. cerevisiae, homolog of, B | | | | |
| | | (RAD54B), mRNA. /FEA = mRNA | | | | |
| | | /GEN = RAD54B /PROD = RAD54, S. cerevisiae, | | | | |
| | | homolog of, B | | | | |
| | | /DB_XREF = gi: 6912621 /UG = Hs.128501 | | | | |
| | | RAD54, S. cerevisiae, homolog of, B | | | | |
| | | /FL = gb: BC001965.1 gb: AF112481.1 | | | | |
| | | gb: NM_012415.1 | | | | |
| 216598_s_at | chemokine (C-C | Consensus includes gb: S69738.1 | CCL2 | −1.3 | −3.1 | −2.4 |
| | motif) ligand 2 | /DEF = MCP-1 = monocyte chemotactic | | | | |
| | | protein human, aortic endothelial cells, | | | | |
| | | mRNA, 661 nt. /FEA = mRNA /GEN = MCP- | | | | |
| | | 1 /PROD = MCP-1 /DB_XREF = gi: 545464 | | | | |
| | | /UG = Hs.303649 small inducible cytokine | | | | |
| | | A2 (monocyte chemotactic protein 1, | | | | |
| | | homologous to mouse Sig-je) | | | | |
| 218355_at | kinesin family | gb: NM_012310.2 /DEF = Homo sapiens | KIF4A | −1.0 | −1.2 | −1.0 |
| | member 4A | kinesin family member 4A (KIF4A), | | | | |
| | | mRNA. /FEA = mRNA /GEN = KIF4A | | | | |
| | | /PROD = kinesin family member 4 | | | | |
| | | /DB_XREF = gi: 7305204 /UG = Hs.279766 kinesin family member | | | | |
| | | 4A/FL = gb: AF179308.1 gb: AF071592.2 | | | | |
| | | gb: NM_012310.2 | | | | |
| 205312_at | spleen focus | gb: NM_003120.1 /DEF = Homo sapiens | SPI1 | 1.0 | 1.0 | −1.2 |
| | forming virus | spleen focus forming virus (SFFV) proviral | | | | |
| | (SFFV) proviral | integration oncogene spi1 (SPI1), mRNA. | | | | |
| | integration | /FEA = mRNA /GEN = SPI1 /PROD = spleen | | | | |
| | oncogene spi1 | focus forming virus (SFFV) | | | | |
| | | proviralintegration oncogene spi1 | | | | |
| | | /DB_XREF = gi: 4507174 /UG = Hs.157441 | | | | |
| | | spleen focus forming virus (SFFV) proviral | | | | |
| | | integration oncogene spi1 | | | | |
| | | /FL = gb: NM_003120.1 | | | | |
| 206499_s_at | chromosome | gb: NM_001269.1 /DEF = Homo sapiens | CHC1 | 1.3 | 1.2 | −1.5 |
| | condensation 1 | chromosome condensation 1 (CHC1), | | | | |
| | | mRNA. /FEA = mRNA /GEN = CHC1 | | | | |
| | | /PROD = chromosome condensation 1 | | | | |
| | | /DB_XREF = gi: 4502800 /UG = Hs.84746 | | | | |
| | | chromosome condensation 1 | | | | |
| | | /FL = gb: NM_001269.1 | | | | |
| 216950_s_at | Fc fragment of IgG, | Consensus includes gb: X14355.1 | FCGR1A | 1.0 | −1.1 | −1.2 |
| | high affinity Ia, receptor for (CD64) | /DEF = Human mRNA for high affinity Fc | | | | |
| | | receptor (FcRI) b form. /FEA = mRNA | | | | |
| | | /DB_XREF = gi: 31333 /UG = Hs.77424 Fc | | | | |
| | | fragment of IgG, high affinity Ia, receptor | | | | |
| | | for (CD64) | | | | |
| 206130_s_at | asialoglycoprotein | gb: NM_001181.1 /DEF = Homo sapiens | ASGR2 | 1.4 | 1.0 | −1.3 |
| | receptor 2 | asialoglycoprotein receptor 2 (ASGR2), | | | | |
| | | mRNA. /FEA = mRNA /GEN = ASGR2 | | | | |
| | | /PROD = asialoglycoprotein receptor 2 | | | | |
| | | /DB_XREF = gi: 4502252 /UG = Hs.1259 | | | | |
| | | asialoglycoprotein receptor 2 | | | | |
| | | /FL = gb: M11025.1 gb: NM_001181.1 | | | | |
| 209464_at | aurora kinase B | gb: AB011446.1 /DEF = Homo sapiens | AURKB | −1.0 | −1.0 | −1.1 |
| | | mRNA for Aik2, complete cds. | | | | |
| | | /FEA = mRNA /GEN = aik2 /PROD = Aik2 | | | | |
| | | /DB_XREF = gi: 5688865 /UG = Hs.180655 | | | | |
| | | serinethreonine kinase 12 | | | | |
| | | /FL = gb: BC000442.1 gb: AF004022.1 | | | | |
| | | gb: AF008552.1 gb: AB011450.1 | | | | |
| | | gb: AF015254.1 gb: NM_004217.1 | | | | |
| | | gb: AB011446.1 | | | | |
| 205997_at | a disintegrin and | gb: NM_021778.1 /DEF = Homo sapiens a | ADAM28 | 1.0 | −1.3 | −1.2 |
| | metalloproteinase domain 28 | disintegrin and metalloproteinase domain | | | | |
| | | 28 (ADAM28), transcript variant 2, mRNA. | | | | |
| | | /FEA = mRNA /GEN = ADAM28 /PROD = a | | | | |
| | | disintegrin and metalloproteinase domain | | | | |
| | | 28, isoform 2 preproprotein | | | | |
| | | /DB_XREF = gi: 11496995 /UG = Hs.174030 | | | | |
| | | a disintegrin and metalloproteinase | | | | |
| | | domain 28 /FL = gb: NM_021778.1 | | | | |
| | | gb: AF137334.1 gb: NM_014265.1 | | | | |
| 202191_s_at | growth arrest- | Consensus includes gb: BE439987 | GAS7 | 1.2 | −1.4 | −1.1 |
| | specific 7 | /FEA = EST /DB_XREF = gi: 9439470 | | | | |
| | | /DB_XREF = est:HTM1-745F | | | | |
| | | /UG = Hs.226133 growth arrest-specific 7 | | | | |
| | | /FL = gb: AB007854.1 gb: NM_005890.1 | | | | |
| 219952_s_at | mucolipin 1 | gb: NM_020533.1 /DEF = Homo sapiens | MCOLN1 | 1.8 | −1.6 | 1.4 |
| | | mucolipin 1 (MCOLN1), mRNA. | | | | |
| | | /FEA = mRNA /GEN = MCOLN1 | | | | |
| | | /PROD = mucolipin 1 | | | | |
| | | /DB_XREF = gi: 10092596 /UG = Hs.12909 | | | | |
| | | mucolipin 1 /FL = gb: NM_020533.1 | | | | |
| | | gb: BC005149.1 gb: AF287269.1 | | | | |
| | | gb: AF249319.1 | | | | |
| 204244_s_at | activator of S | gb: NM_006716.1 /DEF = Homo sapiens | ASK | 1.1 | 1.0 | 1.1 |
| | phase kinase | activator of S phase kinase (ASK), mRNA. | | | | |
| | | /FEA = mRNA /GEN = ASK /PROD = activator | | | | |
| | | of S phase kinase /DB_XREF = gi: 5729733 | | | | |
| | | /UG = Hs.152759 activator of S phase | | | | |
| | | kinase /FL = gb: AB028069.1 | | | | |
| | | gb: AF160249.1 gb: AF160876.1 | | | | |
| | | gb: NM_006716.1 | | | | |
| 205936_s_at | hexokinase 3 | gb: NM_002115.1 /DEF = Homo sapiens | HK3 | 2.4 | −2.5 | −1.8 |
| | (white cell) | hexokinase 3 (white cell) (HK3), mRNA. | | | | |
| | | /FEA = mRNA /GEN = HK3 | | | | |
| | | /PROD = hexokinase 3 (white cell) | | | | |
| | | /DB_XREF = gi: 4504394 /UG = Hs.159237 | | | | |
| | | hexokinase 3 (white cell) /FL = gb: U51333.1 | | | | |
| | | gb: NM_002115.1 | | | | |
| 204766_s_at | nudix (nucleoside | gb: NM_002452.1 /DEF = Homo sapiens | NUDT1 | 67.7 | −1.2 | 1.0 |
| | diphosphate linked moiety X)-type | nudix (nucleoside diphosphate linked | | | | |
| | motif 1 | moiety X)-type motif 1 (NUDT1), mRNA. | | | | |
| | | /FEA = mRNA /GEN = NUDT1 /PROD = nudix | | | | |
| | | (nucleoside diphosphate linked moietyX)- | | | | |
| | | type motif 1 /DB_XREF = gi: 4505274 | | | | |
| | | /UG = Hs.388 nudix (nucleoside | | | | |
| | | diphosphate linked moiety X)-type motif 1 | | | | |
| | | /FL = gb: D16581.1 gb: NM_002452.1 | | | | |
| | | gb: AB025233.1 gb: AB025235.1 | | | | |
| | | gb: AB025237.1 gb: AB025239.1 | | | | |
| | | gb: AB025240.1 gb: AB025241.1 | | | | |
| | | gb: AB025242.1 | | | | |
| 206760_s_at | Fc fragment of IgE, | gb: NM_002002.1 /DEF = Homo sapiens Fc | FCER2 | −1.0 | −1.0 | −1.0 |
| | low affinity II, | fragment of IgE, low affinity II, receptor for | | | | |
| | receptor for | (CD23A) (FCER2), mRNA. /FEA = mRNA | | | | |
| | (CD23A) | /GEN = FCER2 /PROD = Fc fragment of IgE, | | | | |
| | | low affinity II, receptorfor (CD23A) | | | | |
| | | /DB_XREF = gi: 4503678 /UG = Hs.1416 Fc | | | | |
| | | fragment of IgE, low affinity II, receptor for | | | | |
| | | (CD23A) /FL = gb: M15059.1 gb: M14766.1 | | | | |
| | | gb: NM_002002.1 | | | | |
| 208018_s_at | hemopoietic cell | gb: NM_002110.1 /DEF = Homo sapiens | HCK | 1.0 | −1.4 | −1.5 |
| | kinase | hemopoietic cell kinase (HCK), mRNA. | | | | |
| | | /FEA = mRNA /GEN = HCK | | | | |
| | | /PROD = hemopoietic cell kinase | | | | |
| | | /DB_XREF = gi: 4504356 /UG = Hs.89555 | | | | |
| | | hemopoietic cell kinase /FL = gb: M16591.1 | | | | |
| | | gb: NM_002110.1 | | | | |
| 204444_at | kinesin family | gb: NM_004523.2 /DEF = Homo sapiens | KIF11 | −1.0 | −1.0 | −1.0 |
| | member 11 | kinesin-like 1 (KNSL1), mRNA. | | | | |
| | | /FEA = mRNA /GEN = KNSL1 | | | | |
| | | /PROD = kinesin-like 1 | | | | |
| | | /DB_XREF = gi: 13699823 /UG = Hs.8878 | | | | |
| | | kinesin-like 1 /FL = gb: U37426.1 | | | | |
| | | gb: NM_004523.2 | | | | |
| 217785_s_at | SNARE protein | gb: NM_006555.1 /DEF = Homo sapiens | YKT6 | −1.0 | −84.4 | 58.3 |
| | Ykt6 | SNARE protein (YKT6), mRNA. | | | | |
| | | /FEA = mRNA /GEN = YKT6 | | | | |
| | | /PROD = SNARE protein | | | | |
| | | /DB_XREF = gi: 5730119 /UG = Hs.296244 | | | | |
| | | SNARE protein /FL = gb: U95735.1 | | | | |
| | | gb: NM_006555.1 | | | | |
| 203711_s_at | 3-hydroxyisobutyryl- | gb: NM_014362.1 /DEF = Homo sapiens 3- | HIBCH | 50.6 | −1.0 | −1.0 |
| | Coenzyme A | hydroxyisobutyryl-Coenzyme A hydrolase | | | | |
| | hydrolase | (HIBCH), mRNA. /FEA = mRNA | | | | |
| | | /GEN = HIBCH /PROD = 3-hydroxyisobutyryl- | | | | |
| | | Coenzyme A hydrolase | | | | |
| | | /DB_XREF = gi: 7657159 /UG = Hs.236642 3- | | | | |
| | | hydroxyisobutyryl-Coenzyme A hydrolase | | | | |
| | | /FL = gb: BC005190.1 gb: U66669.1 | | | | |
| | | gb: NM_014362.1 | | | | |
| 202437_s_at | cytochrome P450, | gb: NM_000104.2 /DEF = Homo sapiens | CYP1B1 | 1.3 | 1.1 | −1.2 |
| | family 1, subfamily | cytochrome P450, subfamily I (dioxin- | | | | |
| | B, polypeptide 1 | inducible), polypeptide 1 (glaucoma 3, | | | | |
| | | primary infantile) (CYP1B1), mRNA. | | | | |
| | | /FEA = mRNA /GEN = CYP1B1 | | | | |
| | | /PROD = cytochrome P450, subfamily I | | | | |
| | | (dioxin-inducible), polypeptide 1 | | | | |
| | | /DB_XREF = gi: 13325059 /UG = Hs.154654 | | | | |
| | | cytochrome P450, subfamily I (dioxin- | | | | |
| | | inducible), polypeptide 1 (glaucoma 3, | | | | |
| | | primary infantile) /FL = gb: NM_000104.2 | | | | |
| | | gb: U03688.1 | | | | |
| 214567_s_at | chemokine (C | Consensus includes gb: NM_003175.1 | XCL1 /// | 1.0 | 1.0 | −1.2 |
| | motif) ligand 1 | /DEF = Homo sapiens small inducible | XCL2 | | | |
| | | cytokine subfamily C, member 2 (SCYC2), | | | | |
| | | mRNA. /FEA = CDS /GEN = SCYC2 | | | | |
| | | /PROD = small inducible cytokine subfamily | | | | |
| | | C, member 2 /DB_XREF = gi: 4506854 | | | | |
| | | /UG = Hs.174228 small inducible cytokine | | | | |
| | | subfamily C, member 2 | | | | |
| | | /FL = gb: NM_003175.1 | | | | |
| 204826_at | cyclin F | gb: NM_001761.1 /DEF = Homo sapiens | CCNF | −72.4 | −1.0 | −1.0 |
| | | cyclin F (CCNF), mRNA. /FEA = mRNA | | | | |
| | | /GEN = CCNF /PROD = cyclin F | | | | |
| | | /DB_XREF = gi: 4502620 /UG = Hs.1973 | | | | |
| | | cyclin F /FL = gb: NM_001761.1 | | | | |
| | | gb: U17105.1 | | | | |
| 205628_at | primase, | gb: NM_000947.1 /DEF = Homo sapiens | PRIM2A | −1.0 | −1.0 | −1.0 |
| | polypeptide 2A, | primase, polypeptide 2A (58 kD) (PRIM2A), | | | | |
| | 58 kDa | mRNA. /FEA = mRNA /GEN = PRIM2A | | | | |
| | | /PROD = primase, polypeptide 2A (58 kD) | | | | |
| | | /DB_XREF = gi: 4506052 /UG = Hs.74519 | | | | |
| | | primase, polypeptide 2A (58 kD) | | | | |
| | | /FL = gb: NM_000947.1 | | | | |
| 206207_at | Charot-Leyden | gb: NM_001828.3 /DEF = Homo sapiens | CLC | 1.2 | 1.2 | −2.1 |
| | crystal protein | Charot-Leyden crystal protein (CLC), | | | | |
| | | mRNA. /FEA = mRNA /GEN = CLC | | | | |
| | | /PROD = Charot-Leyden crystal protein | | | | |
| | | /DB_XREF = gi: 6325464 /UG = Hs.889 | | | | |
| | | Charot-Leyden crystal protein | | | | |
| | | /FL = gb: L01664.1 gb: NM_001828.3 | | | | |
| 217757_at | alpha-2- | gb: NM_000014.3 /DEF = Homo sapiens | A2M | 1.0 | 1.0 | 1.3 |
| | macroglobulin | alpha-2-macroglobulin (A2M), mRNA. | | | | |
| | | /FEA = mRNA /GEN = A2M /PROD = alpha 2 | | | | |
| | | macroglobulin precursor | | | | |
| | | /DB_XREF = gi: 6226959 /UG = Hs.74561 | | | | |
| | | alpha-2-macroglobulin /FL = gb: M11313.1 | | | | |
| | | gb: NM_000014.3 | | | | |
| 204603_at | exonuclease 1 | gb: NM_003686.1 /DEF = Homo sapiens | EXO1 | −1.0 | −1.0 | −1.0 |
| | | exonuclease 1 (EXO1), mRNA. | | | | |
| | | /FEA = mRNA /GEN = EXO1 /PROD = Rad2 | | | | |
| | | nuclease family member, homolog of | | | | |
| | | S. cerevisiae exonuclease 1 | | | | |
| | | /DB_XREF = gi: 4504368 /UG = Hs.47504 | | | | |
| | | exonuclease 1 /FL = gb: NM_006027.1 | | | | |
| | | gb: AF042282.1 gb: AF060479.1 | | | | |
| | | gb: AF091740.1 gb: AF084974.1 | | | | |
| | | gb: NM_003686.1 | | | | |
| 203968_s_at | CDC6 cell division | gb: NM_001254.1 /DEF = Homo sapiens | CDC6 | −1.0 | −1.0 | 1.1 |
| | cycle 6 homolog | CDC6 (cell division cycle 6, S. cerevisiae) | | | | |
| | (S. cerevisiae) | homolog (CDC6), mRNA. /FEA = mRNA | | | | |
| | | /GEN = CDC6 /PROD = CDC6 (cell division | | | | |
| | | cycle 6, S. cerevisiae)homolog | | | | |
| | | /DB_XREF = gi: 4502702 /UG = Hs.69563 | | | | |
| | | CDC6 (cell division cycle 6, S. cerevisiae) | | | | |
| | | homolog /FL = gb: U77949.1 gb: AF022109.1 | | | | |
| | | gb: NM_001254.1 | | | | |
| 204475_at | matrix | gb: NM_002421.2 /DEF = Homo sapiens | MMP1 | −1.0 | −1.0 | −1.0 |
| | metalloproteinase | matrix metalloproteinase 1 (interstitial | | | | |
| | 1 (interstitial | collagenase) (MMP1), mRNA. | | | | |
| | collagenase) | /FEA = mRNA /GEN = MMP1 /PROD = matrix | | | | |
| | | metalloproteinase 1 preproprotein | | | | |
| | | /DB_XREF = gi: 13027798 /UG = Hs.83169 | | | | |
| | | matrix metalloproteinase 1 (interstitial | | | | |
| | | collagenase) /FL = gb: NM_002421.2 | | | | |
| | | gb: M13509.1 | | | | |
| 218009_s_at | protein regulator of | gb: NM_003981.1 /DEF = Homo sapiens | PRC1 | 1.1 | 1.0 | −61.2 |
| | cytokinesis 1 | protein regulator of cytokinesis 1 (PRC1), | | | | |
| | | mRNA. /FEA = mRNA /GEN = PRC1 | | | | |
| | | /PROD = protein regulator of cytokinesis 1 | | | | |
| | | /DB_XREF = gi: 4506038 /UG = Hs.5101 | | | | |
| | | protein regulator of cytokinesis 1 | | | | |
| | | /FL = gb: BC003138.1 gb: AF044588.1 | | | | |
| | | gb: NM_003981.1 | | | | |
| 207857_at | leukocyte | gb: NM_006866.1 /DEF = Homo sapiens | LILRA2 | 1.2 | 1.1 | −1.3 |
| | immunoglobulin- | leukocyte immunoglobulin-like receptor, | | | | |
| | like receptor, | subfamily A (with TM domain), member 2 | | | | |
| | subfamily B (with | (LILRA2), mRNA. /FEA = mRNA | | | | |
| | TM and ITIM | /GEN = LILRA2 /PROD = leukocyte | | | | |
| | domains), member 1 | immunoglobulin-like receptor, subfamily A | | | | |
| | | (with TM domain), member 2 | | | | |
| | | /DB_XREF = gi: 5803067 /UG = Hs.94498 | | | | |
| | | leukocyte immunoglobulin-like receptor, | | | | |
| | | subfamily A (with TM domain), member 2 | | | | |
| | | /FL = gb: U82275.1 gb: NM_006866.1 | | | | |
| 203973_s_at | KIAA0146 protein | gb: NM_005195.1 /DEF = Homo sapiens | CEBPD | 1.6 | 1.2 | 1.2 |
| | | CCAATenhancer binding protein (CEBP), | | | | |
| | | delta (CEBPD), mRNA. /FEA = mRNA | | | | |
| | | /GEN = CEBPD /PROD = CCAATenhancer | | | | |
| | | binding protein (CEBP), delta | | | | |
| | | /DB_XREF = gi: 4885130 /UG = Hs.76722 | | | | |
| | | CCAATenhancer binding protein (CEBP), | | | | |
| | | delta /FL = gb: M83667.1 gb: NM_005195.1 | | | | |
| 201897_s_at | CDC28 protein | gb: NM_001826.1 /DEF = Homo sapiens | CKS1B | 1.1 | 1.0 | −1.3 |
| | kinase regulatory | CDC28 protein kinase 1 (CKS1), mRNA. | | | | |
| | subunit 1B | /FEA = mRNA /GEN = CKS1 /PROD = CDC28 | | | | |
| | | protein kinase 1 /DB_XREF = gi: 4502856 | | | | |
| | | /UG = Hs.77550 CDC28 protein kinase 1 | | | | |
| | | /FL = gb: BC001425.1 gb: AF274941.1 | | | | |
| | | gb: AF279897.1 gb: NM_001826.1 | | | | |
| 202095_s_at | baculoviral IAP | gb: NM_001168.1 /DEF = Homo sapiens | BIRC5 | −1.0 | −1.0 | −1.0 |
| | repeat-containing 5 | baculoviral IAP repeat-containing 5 | | | | |
| | (survivin) | (survivin) (BIRC5), mRNA. /FEA = mRNA | | | | |
| | | /GEN = BIRC5 /PROD = baculoviral IAP | | | | |
| | | repeat-containing protein 5 | | | | |
| | | /DB_XREF = gi: 4502144 /UG = Hs.1578 | | | | |
| | | baculoviral IAP repeat-containing 5 | | | | |
| | | (survivin) /FL = gb: NM_001168.1 | | | | |
| | | gb: AF077350.1 | | | | |
| 222077_s_at | Rac GTPase | Consensus includes gb: AU153848 | RACGAP1 | 2.0 | −1.2 | −1.2 |
| | activating protein 1 | /FEA = EST /DB_XREF = gi: 11015369 | | | | |
| | | /DB_XREF = est: AU153848 | | | | |
| | | /CLONE = NT2RP3004175 /UG = Hs.23900 | | | | |
| | | GTPase activating protein | | | | |
| 203603_s_at | zinc finger | gb: NM_014795.1 /DEF = Homo sapiens | ZFHX1B | 1.6 | 1.0 | −1.3 |
| | homeobox 1b | zinc finger homeobox 1B (ZFHX1B), | | | | |
| | | mRNA. /FEA = mRNA /GEN = ZFHX1B | | | | |
| | | /PROD = zinc finger homeobox 1B | | | | |
| | | /DB_XREF = gi: 7662183 /UG = Hs.34871 | | | | |
| | | zinc finger homeobox 1B | | | | |
| | | /FL = gb: AB011141.1 gb: NM_014795.1 | | | | |
| 201141_at | glycoprotein | gb: NM_002510.1 /DEF = Homo sapiens | GPNMB | 1.4 | 1.1 | 1.1 |
| | (transmembrane) | glycoprotein (transmembrane) nmb | | | | |
| | nmb | (GPNMB), mRNA. /FEA = mRNA | | | | |
| | | /GEN = GPNMB /PROD = glycoprotein | | | | |
| | | (transmembrane) nmb | | | | |
| | | /DB_XREF = gi: 4505404 /UG = Hs.82226 | | | | |
| | | glycoprotein (transmembrane) nmb | | | | |
| | | /FL = gb: AF322909.1 gb: NM_002510.1 | | | | |
| 218847_at | IGF-II mRNA- | gb: NM_006548.1 /DEF = Homo sapiens | IMP-2 | 1.5 | −1.2 | 1.1 |
| | binding protein 2 | IGF-II mRNA-binding protein 2 (IMP-2), | | | | |
| | | mRNA. /FEA = mRNA /GEN = IMP-2 | | | | |
| | | /PROD = IGF-II mRNA-binding protein 2 | | | | |
| | | /DB_XREF = gi: 5729883 /UG = Hs.30299 | | | | |
| | | IGF-II mRNA-binding protein 2 | | | | |
| | | /FL = gb: AF057352.1 gb: NM_006548.1 | | | | |
| 205769_at | solute carrier | gb: NM_003645.1 /DEF = Homo sapiens | SLC27A2 | −1.0 | −1.0 | −1.0 |
| | family 27 (fatty acid | fatty-acid-Coenzyme A ligase, very long- | | | | |
| | transporter), | chain 1 (FACVL1), mRNA. /FEA = mRNA | | | | |
| | member 2 | /GEN = FACVL1 /PROD = very long-chain | | | | |
| | | fatty-acid-Coenzyme A ligase 1 | | | | |
| | | /DB_XREF = gi: 4503652 /UG = Hs.11729 | | | | |
| | | fatty-acid-Coenzyme A ligase, very long- | | | | |
| | | chain 1 /FL = gb: D88308.1 gb: AF096290.1 | | | | |
| | | gb: NM_003645.1 | | | | |
| 209714_s_at | cyclin-dependent | gb: AF213033.1 /DEF = Homo sapiens | CDKN3 | −1.3 | 1.0 | −1.2 |
| | kinase inhibitor 3 | isolate BX-01 cyclin-dependent kinase | | | | |
| | (CDK2-associated | associated protein phosphatase mRNA, | | | | |
| | dual specificity | complete cds. /FEA = mRNA | | | | |
| | phosphatase) | /PROD = cyclin-dependent kinase | | | | |
| | | associated proteinphosphatase | | | | |
| | | /DB_XREF = gi: 12734643 /UG = Hs.84113 | | | | |
| | | cyclin-dependent kinase inhibitor 3 (CDK2- | | | | |
| | | associated dual specificity phosphatase) | | | | |
| | | /FL = gb: AF213033.1 gb: AF213034.1 | | | | |
| | | gb: AF213035.1 gb: AF213036.1 | | | | |
| | | gb: AF213037.1 gb: AF213038.1 | | | | |
| | | gb: AF213039.1 gb: AF213040.1 | | | | |
| | | gb: AF213041.1 gb: AF213042.1 | | | | |
| | | gb: AF213044.1 gb: AF213046.1 | | | | |
| | | gb: AF213047.1 gb: AF213048.1 | | | | |
| | | gb: AF213049.1 gb: AF213050.1 | | | | |
| | | gb: AF213051.1 gb: AF213052.1 | | | | |
| | | gb: AF213053.1 gb: U02681.1 gb: L25876.1 | | | | |
| | | gb: NM_005192.1 gb: L27711.1 | | | | |
| 205898_at | chemokine (C—X3—C | gb: U20350.1 /DEF = Human G protein- | CX3CR1 | 1.1 | 1.0 | −1.2 |
| | motif) receptor 1 | coupled receptor V28 mRNA, complete | | | | |
| | | cds. /FEA = mRNA /PROD = V28 | | | | |
| | | /DB_XREF = gi: 665580 /UG = Hs.78913 | | | | |
| | | chemokine (C—X3—C) receptor 1 | | | | |
| | | /FL = gb: NM_001337.1 gb: U20350.1 | | | | |
| | | gb: U28934.1 | | | | |
| 203145_at | sperm associated | gb: NM_006461.1 /DEF = Homo sapiens | SPAG5 | 1.1 | 1.3 | 94.7 |
| | antigen 5 | mitotic spindle coiled-coil related protein | | | | |
| | | (DEEPEST), mRNA. /FEA = mRNA | | | | |
| | | /GEN = DEEPEST /PROD = mitotic spindle | | | | |
| | | coiled-coil related protein | | | | |
| | | /DB_XREF = gi: 5453631 /UG = Hs.16244 | | | | |
| | | mitotic spindle coiled-coil related protein | | | | |
| | | /FL = gb: BC000322.1 gb: AF063308.1 | | | | |
| | | gb: NM_006461.1 | | | | |
| 205119_s_at | formyl peptide | gb: NM_002029.1 /DEF = Homo sapiens | | 1.3 | 1.0 | −1.4 |
| | receptor 1 | formyl peptide receptor 1 (FPR1), mRNA. | | | | |
| | | /FEA = mRNA /GEN = FPR1 /PROD = formyl | | | | |
| | | peptide receptor 1 /DB_XREF = gi: 4503778 | | | | |
| | | /UG = Hs.753 formyl peptide receptor 1 | | | | |
| | | /FL = gb: BC005315.1 gb: M60626.1 | | | | |
| | | gb: M60627.1 gb: NM_002029.1 | | | | |
| 203256_at | cadherin 3, type 1, | gb: NM_001793.1 /DEF = Homo sapiens | CDH3 | −1.0 | −1.0 | −1.0 |
| | P-cadherin | cadherin 3, type 1, P-cadherin (placental) | | | | |
| | (placental) | (CDH3), mRNA. /FEA = mRNA | | | | |
| | | /GEN = CDH3 /PROD = cadherin 3, type 1 P- | | | | |
| | | cadherin (placental) | | | | |
| | | /DB_XREF = gi: 4502722 /UG = Hs.2877 | | | | |
| | | cadherin 3, type 1, P-cadherin (placental) | | | | |
| | | /FL = gb: NM_001793.1 | | | | |
| 205085_at | origin recognition | gb: NM_004153.1 /DEF = Homo sapiens | ORC1L | −1.0 | −1.0 | −1.0 |
| | complex, subunit 1- | origin recognition complex, subunit 1 | | | | |
| | like (yeast) | (yeast homolog)-like (ORC1L), mRNA. | | | | |
| | | /FEA = mRNA /GEN = ORC1L /PROD = origin | | | | |
| | | recognition complex, subunit 1 | | | | |
| | | (yeasthomolog)-like | | | | |
| | | /DB_XREF = gi: 4758849 /UG = Hs.17908 | | | | |
| | | origin recognition complex, subunit 1 | | | | |
| | | (yeast homolog)-like /FL = gb: U40152.1 | | | | |
| | | gb: U43416.1 gb: NM_004153.1 | | | | |
| 204759_at | chromosome | gb: NM_001268.1 /DEF = Homo sapiens | CHC1L | 1.6 | 1.0 | 1.2 |
| | condensation 1-like | chromosome condensation 1-like | | | | |
| | | (CHC1L), mRNA. /FEA = mRNA | | | | |
| | | /GEN = CHC1L /PROD = RCC1-like G | | | | |
| | | exchanging factor RLG | | | | |
| | | /DB_XREF = gi: 4557444 /UG = Hs.27007 | | | | |
| | | chromosome condensation 1-like | | | | |
| | | /FL = gb: AF060219.1 gb: NM_001268.1 | | | | |
| 202006_at | protein tyrosine | gb: NM_002835.1 /DEF = Homo sapiens | PTPN12 | 1.1 | −1.2 | −1.7 |
| | phosphatase, non- | protein tyrosine phosphatase, non- | | | | |
| | receptor type 12 | receptor type 12 (PTPN12), mRNA. | | | | |
| | | /FEA = mRNA /GEN = PTPN12 | | | | |
| | | /PROD = protein tyrosine phosphatase, non- | | | | |
| | | receptor type12 /DB_XREF = gi: 4506286 | | | | |
| | | /UG = Hs.62 protein tyrosine phosphatase, | | | | |
| | | non-receptor type 12 /FL = gb: D13380.1 | | | | |
| | | gb: M93425.1 gb: NM_002835.1 | | | | |
| 202086_at | myxovirus | gb: NM_002462.1 /DEF = Homo sapiens | MX1 | 1.1 | −7.3 | −1.2 |
| | (influenza virus) | myxovirus (influenza) resistance 1, | | | | |
| | resistance 1, | homolog of murine (interferon-inducible | | | | |
| | interferon-inducible | protein p78) (MX1), mRNA. /FEA = mRNA | | | | |
| | protein p78 | /GEN = MX1 /PROD = myxovirus (influenza) | | | | |
| | (mouse) | resistance 1, homolog ofmurine (interferon- | | | | |
| | | inducible protein p78) | | | | |
| | | /DB_XREF = gi: 4505290 /UG = Hs.76391 | | | | |
| | | myxovirus (influenza) resistance 1, | | | | |
| | | homolog of murine (interferon-inducible | | | | |
| | | protein p78) /FL = gb: M30817.1 | | | | |
| | | gb: M33882.1 gb: NM_002462.1 | | | | |
| 210423_s_at | solute carrier | gb: L32185.1 /DEF = Homo sapiens integral | SLC11A1 | 1.1 | 1.1 | 1.1 |
| | family 11 (proton- | membrane protein (NRAMP1) mRNA, | | | | |
| | coupled divalent | complete cds. /FEA = mRNA | | | | |
| | metal ion | /GEN = NRAMP1 /PROD = integral | | | | |
| | transporters), | membrane protein /DB_XREF = gi: 600219 | | | | |
| | member 1 | /UG = Hs.182611 solute carrier family 11 | | | | |
| | | (proton-coupled divalent metal ion | | | | |
| | | transporters), member 1 /FL = gb: D50402.1 | | | | |
| | | gb: D50403.1 gb: NM_000578.1 | | | | |
| | | gb: L32185.1 | | | | |
| 204588_s_at | solute carrier | gb: NM_003982.1 /DEF = Homo sapiens | SLC7A7 | 1.0 | −1.1 | 1.0 |
| | family 7 (cationic | solute carrier family 7 (cationic amino acid | | | | |
| | amino acid | transporter, y+ system), member 7 | | | | |
| | transporter, y+ | (SLC7A7), mRNA. /FEA = mRNA | | | | |
| | system), member 7 | /GEN = SLC7A7 /PROD = solute carrier | | | | |
| | | family 7 (cationic amino acidtransporter, | | | | |
| | | y+ system), member 7 | | | | |
| | | /DB_XREF = gi: 4507054 /UG = Hs.194693 | | | | |
| | | solute carrier family 7 (cationic amino acid | | | | |
| | | transporter, y+ system), member 7 | | | | |
| | | /FL = gb: BC003062.1 gb: AF092032.1 | | | | |
| | | gb: NM_003982.1 gb: AB011263.1 | | | | |
| 214437_s_at | serine | Consensus includes gb: NM_005412.1 | SHMT2 | 1.3 | −1.3 | −1.6 |
| | hydroxymethyltransferase 2 | /DEF = Homo sapiens serine | | | | |
| | (mitochondrial) | hydroxymethyltransferase 2 | | | | |
| | | (mitochondrial) (SHMT2), mRNA. | | | | |
| | | /FEA = CDS /GEN = SHMT2 /PROD = serine | | | | |
| | | hydroxymethyltransferase 2(mitochondrial) | | | | |
| | | /DB_XREF = gi: 4885594 /UG = Hs.75069 | | | | |
| | | serine hydroxymethyltransferase 2 | | | | |
| | | (mitochondrial) /FL = gb: NM_005412.1 | | | | |
| 216248_s_at | nuclear receptor | Consensus includes gb: S77154.1 | NR4A2 | 1.2 | 1.0 | −1.1 |
| | subfamily 4, group | /DEF = TINUR = NGFI-Bnur77 beta-type | | | | |
| | A, member 2 | transcription factor homolog human, T | | | | |
| | | lymphoid cell line, PEER, mRNA, 2469 nt. | | | | |
| | | /FEA = mRNA /GEN = TINUR | | | | |
| | | /DB_XREF = gi: 913966 /UG = Hs.82120 | | | | |
| | | nuclear receptor subfamily 4, group A, | | | | |
| | | member 2 | | | | |
| 204170_s_at | CDC28 protein | gb: NM_001827.1 /DEF = Homo sapiens | CKS2 | 1.1 | −1.7 | −1.9 |
| | kinase regulatory | CDC28 protein kinase 2 (CKS2), mRNA. | | | | |
| | subunit 2 | /FEA = mRNA /GEN = CKS2 /PROD = CDC28 | | | | |
| | | protein kinase 2 /DB_XREF = gi: 4502858 | | | | |
| | | /UG = Hs.83758 CDC28 protein kinase 2 | | | | |
| | | /FL = gb: NM_001827.1 | | | | |
| 201425_at | aldehyde | gb: NM_000690.1 /DEF = Homo sapiens | ALDH2 | 1.1 | 1.1 | −1.3 |
| | dehydrogenase 2 | aldehyde dehydrogenase 2, mitochondrial | | | | |
| | family | (ALDH2), mRNA. /FEA = mRNA | | | | |
| | (mitochondrial) | /GEN = ALDH2 /PROD = aldehyde | | | | |
| | | dehydrogenase 2, mitochondrial | | | | |
| | | /DB_XREF = gi: 4502032 /UG = Hs.195432 | | | | |
| | | aldehyde dehydrogenase 2 family | | | | |
| | | (mitochondrial) /FL = gb: BC002967.1 | | | | |
| | | gb: NM_000690.1 | | | | |
| 204575_s_at | matrix | gb: U38321.1 /DEF = Homo sapiens clone | MMP19 | −1.4 | −69.0 | 51.1 |
| | metalloproteinase | rasi-11 matrix metalloproteinase RASI-1 | | | | |
| | 19 | mRNA, complete cds. /FEA = mRNA | | | | |
| | | /PROD = matrix metalloproteinase RASI-1 | | | | |
| | | /DB_XREF = gi: 2228243 /UG = Hs.154057 | | | | |
| | | matrix metalloproteinase 19 | | | | |
| | | /FL = gb: NM_002429.2 gb: U38321.1 | | | | |
| | | gb: U37791.1 | | | | |
| 206414_s_at | development and | gb: NM_003887.1 /DEF = Homo sapiens | DDEF2 | −1.0 | −1.0 | −1.0 |
| | differentiation | development and differentiation enhancing | | | | |
| | enhancing factor 2 | factor 2 (DDEF2), mRNA. /FEA = mRNA | | | | |
| | | /GEN = DDEF2 /PROD = ADP-ribosylation | | | | |
| | | factorarf-directed GTPaseactivating | | | | |
| | | protein /DB_XREF = gi: 4502248 | | | | |
| | | /UG = Hs.12802 development and | | | | |
| | | differentiation enhancing factor 2 | | | | |
| | | /FL = gb: AB007860.1 gb: NM_003887.1 | | | | |
| 218567_x_at | dipeptidylpeptidase 3 | gb: NM_005700.1 /DEF = Homo sapiens | DPP3 | −1.2 | −1.7 | −1.6 |
| | | dipeptidylpeptidase III (DPP3), mRNA. | | | | |
| | | /FEA = mRNA /GEN = DPP3 | | | | |
| | | /PROD = dipeptidylpeptidase III | | | | |
| | | /DB_XREF = gi: 11342681 /UG = Hs.22880 | | | | |
| | | dipeptidylpeptidase III | | | | |
| | | /FL = gb: NM_005700.1 gb: BC001446.1 | | | | |
| 202820_at | aryl hydrocarbon | gb: NM_001621.2 /DEF = Homo sapiens | AHR | 1.2 | 1.1 | 1.2 |
| | receptor | aryl hydrocarbon receptor (AHR), mRNA. | | | | |
| | | /FEA = mRNA /GEN = AHR /PROD = aryl | | | | |
| | | hydrocarbon receptor | | | | |
| | | /DB_XREF = gi: 5016091 /UG = Hs.170087 | | | | |
| | | aryl hydrocarbon receptor | | | | |
| | | /FL = gb: L19872.1 gb: D16354.1 | | | | |
| | | gb: NM_001621.2 | | | | |
| 214038_at | chemokine (C-C | Consensus includes gb: AI984980 | CCL8 | 1.1 | −8.4 | −1.2 |
| | motif) ligand 8 | /FEA = EST /DB_XREF = gi: 5812257 | | | | |
| | | /DB_XREF = est: wr88g11.x1 | | | | |
| | | /CLONE = IMAGE: 2494820 | | | | |
| | | /UG = Hs.271387 small inducible cytokine | | | | |
| | | subfamily A (Cys-Cys), member 8 | | | | |
| | | (monocyte chemotactic protein 2) | | | | |
| | | /FL = gb: NM_005623.1 | | | | |
| 204439_at | chromosome 1 | gb: NM_006820.1 /DEF = Homo sapiens | C1orf29 | −1.0 | −894.0 | 2.2 |
| | open reading | hypothetical protein, expressed in | | | | |
| | frame 29 | osteoblast (GS3686), mRNA. | | | | |
| | | /FEA = mRNA /GEN = GS3686 | | | | |
| | | /PROD = hypothetical protein, expressed in | | | | |
| | | osteoblast /DB_XREF = gi: 5803026 | | | | |
| | | /UG = Hs.75470 hypothetical protein, | | | | |
| | | expressed in osteoblast | | | | |
| | | /FL = gb: AB000115.1 gb: NM_006820.1 | | | | |
| 217853_at | tensin-like SH2 | gb: NM_022748.1 /DEF = Homo sapiens | TENS1 | 1.2 | −1.4 | −1.9 |
| | domain containing 1 | hypothetical protein FLJ13732 similar to | | | | |
| | | tensin (FLJ13732), mRNA. /FEA = mRNA | | | | |
| | | /GEN = FLJ13732 /PROD = hypothetical | | | | |
| | | protein FLJ13732 similar to tensin | | | | |
| | | /DB_XREF = gi: 12232408 /UG = Hs.12210 | | | | |
| | | hypothetical protein FLJ13732 similar to | | | | |
| | | tensin /FL = gb: NM_022748.1 | | | | |
| 220646_s_at | killer cell lectin-like | gb: NM_016523.1 /DEF = Homo sapiens | KLRF1 | 1.7 | 1.1 | 1.1 |
| | receptor subfamily | killer cell lectin-like receptor F1 (KLRF1), | | | | |
| | F, member 1 | mRNA. /FEA = mRNA /GEN = KLRF1 | | | | |
| | | /PROD = killer cell lectin-like receptor F1 | | | | |
| | | /DB_XREF = gi: 7705573 /UG = Hs.183125 | | | | |
| | | killer cell lectin-like receptor F1 | | | | |
| | | /FL = gb: AF175206.1 gb: NM_016523.1 | | | | |
| 201666_at | tissue inhibitor of | gb: NM_003254.1 /DEF = Homo sapiens | TIMP1 | 1.0 | −1.3 | 1.0 |
| | metalloproteinase | tissue inhibitor of metalloproteinase 1 | | | | |
| | 1 (erythroid | (erythroid potentiating activity, collagenase | | | | |
| | potentiating | inhibitor) (TIMP1), mRNA. /FEA = mRNA | | | | |
| | activity, | /GEN = TIMP1 /PROD = tissue inhibitor of | | | | |
| | collagenase | metalloproteinase 1precursor | | | | |
| | inhibitor) | /DB_XREF = gi: 4507508 /UG = Hs.5831 | | | | |
| | | tissue inhibitor of metalloproteinase 1 | | | | |
| | | (erythroid potentiating activity, collagenase | | | | |
| | | inhibitor) /FL = gb: BC000866.1 | | | | |
| | | gb: M12670.1 gb: M59906.1 | | | | |
| | | gb: NM_003254.1 | | | | |
| 219505_at | cat eye syndrome | gb: NM_017424.1 /DEF = Homo sapiens cat | CECR1 | −1.4 | −1.2 | 1.1 |
| | chromosome | eye syndrome chromosome region, | | | | |
| | region, candidate 1 | candidate 1 (CECR1), mRNA. | | | | |
| | | /FEA = mRNA /GEN = CECR1 /PROD = cat | | | | |
| | | eye syndrome critical region protein 1 | | | | |
| | | /DB_XREF = gi: 8393092 /UG = Hs.170310 | | | | |
| | | cat eye syndrome chromosome region, | | | | |
| | | candidate 1 /FL = gb: AF190746.1 | | | | |
| | | gb: NM_017424.1 | | | | |
| 204936_at | splicing factor 1 | gb: NM_004579.1 /DEF = Homo sapiens | MAP4K2 | −1.0 | −1.0 | −1.0 |
| | [BLAST] | mitogen-activating protein kinase kinase | | | | |
| | | kinase kinase 2 (MAP4K2), mRNA. | | | | |
| | | /FEA = mRNA /GEN = MAP4K2 | | | | |
| | | /PROD = mitogen-activating protein kinase | | | | |
| | | kinase kinasekinase 2 | | | | |
| | | /DB_XREF = gi: 4759009 /UG = Hs.82979 | | | | |
| | | mitogen-activating protein kinase kinase | | | | |
| | | kinase kinase 2 /FL = gb: NM_004579.1 | | | | |
| | | gb: U07349.1 | | | | |
| 209189_at | v-fos FBJ murine | gb: BC004490.1 /DEF = Homo sapiens, v- | FOS | 1.1 | 1.0 | 1.5 |
| | osteosarcoma viral | fos FBJ murine osteosarcoma viral | | | | |
| | oncogene homolog | oncogene homolog, clone MGC: 11074, | | | | |
| | | mRNA, complete cds. /FEA = mRNA | | | | |
| | | /PROD = v-fos FBJ murine osteosarcoma | | | | |
| | | viral oncogenehomolog | | | | |
| | | /DB_XREF = gi: 13325363 /UG = Hs.25647 v- | | | | |
| | | fos FBJ murine osteosarcoma viral | | | | |
| | | oncogene homolog /FL = gb: BC004490.1 | | | | |
| | | gb: NM_005252.2 | | | | |
| 217996_at | pleckstrin | Consensus includes gb: AA576961 | PHLDA1 | 1.2 | 63.7 | −66.0 |
| | homology-like | /FEA = EST /DB_XREF = gi: 2354435 | | | | |
| | domain, family A, | /DB_XREF = est: nm82d08.s1 | | | | |
| | member 1 | /CLONE = IMAGE: 1074735 /UG = Hs.82101 | | | | |
| | | pleckstrin homology-like domain, family A, | | | | |
| | | member 1 /FL = gb: NM_007350.1 | | | | |
| 218350_s_at | geminin, DNA | gb: NM_015895.1 /DEF = Homo sapiens | GMNN | 1.2 | −1.3 | −1.3 |
| | replication inhibitor | geminin (LOC51053), mRNA. | | | | |
| | | /FEA = mRNA /GEN = LOC51053 | | | | |
| | | /PROD = geminin /DB_XREF = gi: 7705681 | | | | |
| | | /UG = Hs.234896 geminin | | | | |
| | | /FL = gb: AF067855.1 gb: NM_015895.1 | | | | |
| 209709_s_at | hyaluronan- | gb: U29343.1 /DEF = Homo sapiens | HMMR | −71.2 | −1.0 | −74.3 |
| | mediated motility | hyaluronan receptor (RHAMM) mRNA, | | | | |
| | receptor (RHAMM) | complete cds. /FEA = mRNA | | | | |
| | | /GEN = RHAMM /PROD = hyaluronan | | | | |
| | | receptor /DB_XREF = gi: 2959555 | | | | |
| | | /UG = Hs.72550 hyaluronan-mediated | | | | |
| | | motility receptor (RHAMM) | | | | |
| | | /FL = gb: U29343.1 gb: AF032862.1 | | | | |
| | | gb: NM_012484.1 | | | | |
| 220688_s_at | chromosome 1 | gb: NM_016183.1 /DEF = Homo sapiens | C1orf33 | 1.3 | −1.2 | −1.3 |
| | open reading | 60S acidic ribosomal protein PO | | | | |
| | frame 33 | (LOC51154), mRNA. /FEA = mRNA | | | | |
| | | /GEN = LOC51154 /PROD = 60S acidic | | | | |
| | | ribosomal protein PO | | | | |
| | | /DB_XREF = gi: 7705874 /UG = Hs.274201 | | | | |
| | | 60S acidic ribosomal protein PO | | | | |
| | | /FL = gb: AF173378.1 gb: NM_016183.1 | | | | |
| 202388_at | regulator of G- | gb: NM_002923.1 /DEF = Homo sapiens | RGS2 | 1.4 | 1.2 | 1.3 |
| | protein signalling 2, | regulator of G-protein signalling 2, 24 kD | | | | |
| | 24 kDa | (RGS2), mRNA. /FEA = mRNA | | | | |
| | | /GEN = RGS2 /PROD = regulator of G- | | | | |
| | | protein signalling 2, 24 kD | | | | |
| | | /DB_XREF = gi: 4506516 /UG = Hs.78944 | | | | |
| | | regulator of G-protein signalling 2, 24 kD | | | | |
| | | /FL = gb: L13463.1 gb: NM_002923.1 | | | | |
| 201506_at | transforming | gb: NM_000358.1 /DEF = Homo sapiens | TGFBI | 1.0 | −1.2 | 1.0 |
| | growth factor, beta- | transforming growth factor, beta-induced, | | | | |
| | induced, 68 kDa | 68 kD (TGFBI), mRNA. /FEA = mRNA | | | | |
| | | /GEN = TGFBI /PROD = transforming growth | | | | |
| | | factor, beta-induced, 68 kD | | | | |
| | | /DB_XREF = gi: 4507466 /UG = Hs.118787 | | | | |
| | | transforming growth factor, beta-induced, | | | | |
| | | 68 kD /FL = gb: BC000097.1 gb: BC004972.1 | | | | |
| | | gb: M77349.1 gb: NM_000358.1 | | | | |
| 204092_s_at | serine/threonine | gb: NM_003600.1 /DEF = Homo sapiens | STK6 | −1.0 | −60.9 | 55.8 |
| | kinase 6 | serinethreonine kinase 15 (STK15), | | | | |
| | | mRNA. /FEA = mRNA /GEN = STK15 | | | | |
| | | /PROD = serinethreonine kinase 15 | | | | |
| | | /DB_XREF = gi: 4507274 /UG = Hs.48915 | | | | |
| | | serinethreonine kinase 15 | | | | |
| | | /FL = gb: AF008551.1 gb: AF011468.1 | | | | |
| | | gb: NM_003600.1 | | | | |
| 203561_at | Fc fragment of IgG, | gb: NM_021642.1 /DEF = Homo sapiens Fc | FCGR2A | 1.1 | −1.2 | 1.2 |
| | low affinity IIa, | fragment of IgG, low affinity IIa, receptor | | | | |
| | receptor for (CD32) | for (CD32) (FCGR2A), mRNA. | | | | |
| | | /FEA = mRNA /GEN = FCGR2A /PROD = Fc | | | | |
| | | fragment of IgG, low affinity IIa, | | | | |
| | | receptorfor (CD32) | | | | |
| | | /DB_XREF = gi: 11056051 /UG = Hs.78864 | | | | |
| | | Fc fragment of IgG, low affinity IIa, | | | | |
| | | receptor for (CD32) /FL = gb: NM_021642.1 | | | | |
| | | gb: M31932.1 gb: J03619.1 gb: M28697.1 | | | | |
| 217983_s_at | ribonuclease T2 | gb: NM_003730.2 /DEF = Homo sapiens | RNASET2 | 1.4 | 1.1 | 1.1 |
| | | ribonuclease 6 precursor (RNASE6PL), | | | | |
| | | mRNA. /FEA = mRNA /GEN = RNASE6PL | | | | |
| | | /PROD = ribonuclease 6 precursor | | | | |
| | | /DB_XREF = gi: 5231227 /UG = Hs.8297 | | | | |
| | | ribonuclease 6 precursor | | | | |
| | | /FL = gb: BC001660.1 gb: BC001819.1 | | | | |
| | | gb: U85625.2 gb: NM_003730.2 | | | | |
| 204446_s_at | arachidonate 5- | gb: NM_000698.1 /DEF = Homo sapiens | ALOX5 | 1.2 | −1.3 | −1.3 |
| | lipoxygenase | arachidonate 5-lipoxygenase (ALOX5), | | | | |
| | | mRNA. /FEA = mRNA /GEN = ALOX5 | | | | |
| | | /PROD = arachidonate 5-lipoxygenase | | | | |
| | | /DB_XREF = gi: 4502056 /UG = Hs.89499 | | | | |
| | | arachidonate 5-lipoxygenase | | | | |
| | | /FL = gb: J03600.1 gb: J03571.1 | | | | |
| | | gb: NM_000698.1 | | | | |
| 208303_s_at | cytokine receptor- | gb: NM_022148.1 /DEF = Homo sapiens | CRLF2 | −65.7 | 67.0 | 56.7 |
| | like factor 2 | cytokine receptor-like factor 2 (CRLF2), | | | | |
| | | mRNA. /FEA = mRNA /GEN = CRLF2 | | | | |
| | | /PROD = cytokine receptor-like factor 2 | | | | |
| | | /DB_XREF = gi: 13375623 /UG = Hs.287729 | | | | |
| | | cytokine receptor-like factor 2 | | | | |
| | | /FL = gb: NM_022148.1 | | | | |
| 218589_at | purinergic receptor | gb: NM_005767.1 /DEF = Homo sapiens | P2RY5 | 1.4 | −1.1 | 1.1 |
| | P2Y, G-protein | purinergic receptor (family A group 5) | | | | |
| | coupled, 5 | (P2Y5), mRNA. /FEA = mRNA /GEN = P2Y5 | | | | |
| | | /PROD = purinergic receptor (family A | | | | |
| | | group 5) /DB_XREF = gi: 5031968 | | | | |
| | | /UG = Hs.189999 purinergic receptor | | | | |
| | | (family A group 5) /FL = gb: AF000546.1 | | | | |
| | | gb: NM_005767.1 | | | | |
| 209715_at | chromobox | gb: L07515.1 /DEF = Human | CBX5 | −62.7 | −1.0 | −1.0 |
| | homolog 5 (HP1 | heterochromatin protein homologue (HP1) | | | | |
| | alpha homolog, | mRNA, complete cds. /FEA = mRNA | | | | |
| | Drosophila) | /DB_XREF = gi: 184310 /UG = Hs.89232 | | | | |
| | | chromobox homolog 5 (Drosophila HP1 | | | | |
| | | alpha) /FL = gb: L07515.1 gb: NM_012117.1 | | | | |
| 203126_at | inositol(myo)-1(or | gb: NM_014214.1 /DEF = Homo sapiens | IMPA2 | 1.0 | −1.7 | 1.0 |
| | 4)- | inositol(myo)-1(or 4)-monophosphatase 2 | | | | |
| | monophosphatase 2 | (IMPA2), mRNA. /FEA = mRNA | | | | |
| | | /GEN = IMPA2 /PROD = inositol(myo)-1(or | | | | |
| | | 4)-monophosphatase 2 | | | | |
| | | /DB_XREF = gi: 7657235 /UG = Hs.5753 | | | | |
| | | inositol(myo)-1(or 4)-monophosphatase 2 | | | | |
| | | /FL = gb: AF200432.1 gb: NM_014214.1 | | | | |
| | | gb: AF014398.2 | | | | |
| 218400_at | 2′-5′-oligoadenylate | gb: NM_006187.1 /DEF = Homo sapiens 2- | OAS3 | −1.1 | −3.1 | −1.2 |
| | synthetase 3, | 5oligoadenylate synthetase 3 (OAS3), | | | | |
| | 100 kDa | mRNA. /FEA = mRNA /GEN = OAS3 | | | | |
| | | /PROD = 2-5oligoadenylate synthetase 3 | | | | |
| | | /DB_XREF = gi: 5453823 /UG = Hs.56009 2- | | | | |
| | | 5oligoadenylate synthetase 3 | | | | |
| | | /FL = gb: AB044545.1 gb: AF063613.1 | | | | |
| | | gb: NM_006187.1 | | | | |
| 206715_at | transcription factor | gb: NM_012252.1 /DEF = Homo sapiens | TFEC | 1.1 | −1.3 | −1.6 |
| | EC | transcription factor EC (TFEC), mRNA. | | | | |
| | | /FEA = mRNA /GEN = TFEC | | | | |
| | | /PROD = transcription factor EC | | | | |
| | | /DB_XREF = gi: 6912701 /UG = Hs.113274 | | | | |
| | | transcription factor EC /FL = gb: D43945.1 | | | | |
| | | gb: NM_012252.1 | | | | |
| 204620_s_at | chondroitin sulfate | gb: NM_004385.1 /DEF = Homo sapiens | CSPG2 | 1.5 | 1.0 | −1.1 |
| | proteoglycan 2 | chondroitin sulfate proteoglycan 2 | | | | |
| | (versican) | (versican) (CSPG2), mRNA. /FEA = mRNA | | | | |
| | | /GEN = CSPG2 /PROD = chondroitin sulfate | | | | |
| | | proteoglycan 2 (versican) | | | | |
| | | /DB_XREF = gi: 4758081 /UG = Hs.81800 | | | | |
| | | chondroitin sulfate proteoglycan 2 | | | | |
| | | (versican) /FL = gb: NM_004385.1 | | | | |
| 215071_s_at | histone 1, H2ac | Consensus includes gb: AL353759 | HIST1H2AC | 1.5 | 1.4 | 65.8 |
| | | /DEF = Human DNA sequence from clone | | | | |
| | | RP1-221C16 on chromosome 6. Contains | | | | |
| | | two genes for novel histone 4 family | | | | |
| | | members, two genes for novel histone 1 | | | | |
| | | family members, three genes for novel | | | | |
| | | histone 2B family members, a gene for a | | | | |
| | | novel histone 2A family me . . . | | | | |
| | | /FEA = mRNA_18 /DB_XREF = gi: 8745068 | | | | |
| | | /UG = Hs.28777 H2A histone family, | | | | |
| | | member L | | | | |
| 208581_x_at | metallothionein 1X | gb: NM_005952.1 /DEF = Homo sapiens | MT1X | 1.2 | −1.4 | −1.5 |
| | | metallothionein 1X (MT1X), mRNA. | | | | |
| | | /FEA = CDS /GEN = MT1X | | | | |
| | | /PROD = metallothionein 1X | | | | |
| | | /DB_XREF = gi: 10835231 /UG = Hs.278462 | | | | |
| | | metallothionein 1X /FL = gb: NM_005952.1 | | | | |
| 39248_at | aquaporin 3 | Cluster Incl. N74607: za55a01.s1 Homo | AQP3 | 1.5 | 1.0 | 1.1 |
| | | sapiens cDNA, 3 end /clone = IMAGE- | | | | |
| | | 296424 /clone_end = 3′ /gb = N74607 | | | | |
| | | /gi = 1231892 /ug = Hs.234642 /len = 487 | | | | |
| 219466_s_at | apolipoprotein A-II | gb: NM_001643.1 /DEF = Homo sapiens | APOA2 | 54.0 | 1.0 | −1.0 |
| | | apolipoprotein A-II (APOA2), mRNA. | | | | |
| | | /FEA = mRNA /GEN = APOA2 | | | | |
| | | /PROD = apolipoprotein A-II precursor | | | | |
| | | /DB_XREF = gi: 4502148 /UG = Hs.237658 | | | | |
| | | apolipoprotein A-II /FL = gb: BC005282.1 | | | | |
| | | gb: M29882.1 gb: NM_001643.1 | | | | |
| 206365_at | chemokine (C | gb: NM_002995.1 /DEF = Homo sapiens | XCL1 | −1.0 | −1.0 | 60.5 |
| | motif) ligand 1 | small inducible cytokine subfamily C, | | | | |
| | | member 1 (lymphotactin) (SCYC1), | | | | |
| | | mRNA. /FEA = mRNA /GEN = SCYC1 | | | | |
| | | /PROD = small inducible cytokine subfamily | | | | |
| | | C, member 1(lymphotactin) | | | | |
| | | /DB_XREF = gi: 4506852 /UG = Hs.3195 | | | | |
| | | small inducible cytokine subfamily C, | | | | |
| | | member 1 (lymphotactin) | | | | |
| | | /FL = gb: NM_002995.1 gb: U23772.1 | | | | |
| | | gb: D43768.1 | | | | |
| 205024_s_at | RAD51 homolog | gb: NM_002875.1 /DEF = Homo sapiens | RAD51 | −51.2 | −1.3 | 1.1 |
| | (RecA homolog, E. coli) | RAD51 (S. cerevisiae) homolog (E coli | | | | |
| | (S. cerevisiae) | RecA homolog) (RAD51), mRNA. | | | | |
| | | /FEA = mRNA /GEN = RAD51 | | | | |
| | | /PROD = RAD51 (S. cerevisiae) homolog | | | | |
| | | (E coli RecAhomolog) | | | | |
| | | /DB_XREF = gi: 4506388 /UG = Hs.23044 | | | | |
| | | RAD51 (S. cerevisiae) homolog (E coli | | | | |
| | | RecA homolog) /FL = gb: D14134.1 | | | | |
| | | gb: D13804.1 gb: NM_002875.1 | | | | |
| 219890_at | C-type (calcium | gb: NM_013252.1 /DEF = Homo sapiens C- | CLECSF5 | 1.5 | 1.0 | −1.2 |
| | dependent, | type (calcium dependent, carbohydrate- | | | | |
| | carbohydrate- | recognition domain) lectin, superfamily | | | | |
| | recognition | member 5 (CLECSF5), mRNA. | | | | |
| | domain) lectin, | /FEA = mRNA /GEN = CLECSF5 /PROD = C- | | | | |
| | superfamily | type (calcium dependent, carbohydrate- | | | | |
| | member 5 | recognition domain) lectin, | | | | |
| | | superfamilymember 5 | | | | |
| | | /DB_XREF = gi: 10281668 /UG = Hs.126355 | | | | |
| | | C-type (calcium dependent, carbohydrate- | | | | |
| | | recognition domain) lectin, superfamily | | | | |
| | | member 5 /FL = gb: NM_013252.1 | | | | |
| | | gb: AF139768.1 | | | | |
| 204122_at | TYRO protein | gb: NM_003332.1 /DEF = Homo sapiens | TYROBP | 1.0 | −1.2 | 1.0 |
| | tyrosine kinase | TYRO protein tyrosine kinase binding | | | | |
| | binding protein | protein (TYROBP), mRNA. /FEA = mRNA | | | | |
| | | /GEN = TYROBP /PROD = TYRO protein | | | | |
| | | tyrosine kinase binding protein | | | | |
| | | /DB_XREF = gi: 4507754 /UG = Hs.9963 | | | | |
| | | TYRO protein tyrosine kinase binding | | | | |
| | | protein /FL = gb: AF019562.1 | | | | |
| | | gb: NM_003332.1 | | | | |
| 205909_at | polymerase (DNA | gb: NM_002692.1 /DEF = Homo sapiens | POLE2 | 1.0 | −1.1 | 1.0 |
| | directed), epsilon 2 | polymerase (DNA directed), epsilon 2 | | | | |
| | (p59 subunit) | (POLE2), mRNA. /FEA = mRNA | | | | |
| | | /GEN = POLE2 /PROD = polymerase (DNA | | | | |
| | | directed), epsilon 2 | | | | |
| | | /DB_XREF = gi: 4505934 /UG = Hs.99185 | | | | |
| | | polymerase (DNA directed), epsilon 2 | | | | |
| | | /FL = gb: AF025840.1 gb: AF036899.1 | | | | |
| | | gb: NM_002692.1 | | | | |
| 202768_at | FBJ murine | gb: NM_006732.1 /DEF = Homo sapiens | FOSB | 1.4 | −1.5 | 53.4 |
| | osteosarcoma viral | FBJ murine osteosarcoma viral oncogene | | | | |
| | oncogene homolog B | homolog B (FOSB), mRNA. /FEA = mRNA | | | | |
| | | /GEN = FOSB /PROD = FBJ murine | | | | |
| | | osteosarcoma viral oncogene homologB | | | | |
| | | /DB_XREF = gi: 5803016 /UG = Hs.75678 | | | | |
| | | FBJ murine osteosarcoma viral oncogene | | | | |
| | | homolog B /FL = gb: L49169.1 | | | | |
| | | gb: NM_006732.1 | | | | |
| 203988_s_at | fucosyltransferase | gb: NM_004480.1 /DEF = Homo sapiens | FUT8 | 51.5 | −1.0 | −1.0 |
| | 8 (alpha (1,6) | fucosyltransferase 8 (alpha (1,6) | | | | |
| | fucosyltransferase) | fucosyltransferase) (FUT8), mRNA. | | | | |
| | | /FEA = mRNA /GEN = FUT8 | | | | |
| | | /PROD = fucosyltransferase 8 (alpha | | | | |
| | | (1,6)fucosyltransferase) | | | | |
| | | /DB_XREF = gi: 4758407 /UG = Hs.118722 | | | | |
| | | fucosyltransferase 8 (alpha (1,6) | | | | |
| | | fucosyltransferase) /FL = gb: D89289.1 | | | | |
| | | gb: NM_004480.1 | | | | |
| 201743_at | CD14 antigen | gb: NM_000591.1 /DEF = Homo sapiens | CD14 | 1.1 | −1.1 | 1.2 |
| | | CD14 antigen (CD14), mRNA. | | | | |
| | | /FEA = mRNA /GEN = CD14 /PROD = CD14 | | | | |
| | | antigen precursor /DB_XREF = gi: 4557416 | | | | |
| | | /UG = Hs.75627 CD14 antigen | | | | |
| | | /FL = gb: M86511.1 gb: AF097942.1 | | | | |
| | | gb: NM_000591.1 | | | | |
| 204222_s_at | GLI pathogenesis- | gb: NM_006851.1 /DEF = Homo sapiens | GLIPR1 | 1.0 | −1.2 | 1.1 |
| | related 1 (glioma) | glioma pathogenesis-related protein | | | | |
| | | (RTVP1), mRNA. /FEA = mRNA | | | | |
| | | /GEN = RTVP1 /PROD = glioma | | | | |
| | | pathogenesis-related protein | | | | |
| | | /DB_XREF = gi: 5803150 /UG = Hs.64639 | | | | |
| | | glioma pathogenesis-related protein | | | | |
| | | /FL = gb: U16307.1 gb: NM_006851.1 | | | | |
| 207277_at | CD209 antigen | gb: AF290886.1 /DEF = Homo sapiens DC- | CD209 | 1.4 | −1.2 | −1.5 |
| | | SIGN mRNA, complete cds. /FEA = mRNA | | | | |
| | | /PROD = DC-SIGN | | | | |
| | | /DB_XREF = gi: 13383467 /UG = Hs.278694 | | | | |
| | | CD209 antigen /FL = gb: NM_021155.1 | | | | |
| | | gb: AF290886.1 gb: M98457.1 | | | | |
| 202338_at | thymidine kinase 1, | gb: NM_003258.1 /DEF = Homo sapiens | TK1 | −1.0 | −1.0 | −1.4 |
| | soluble | thymidine kinase 1, soluble (TK1), mRNA. | | | | |
| | | /FEA = mRNA /GEN = TK1 | | | | |
| | | /PROD = thymidine kinase 1, soluble | | | | |
| | | /DB_XREF = gi: 4507518 /UG = Hs.105097 | | | | |
| | | thymidine kinase 1, soluble | | | | |
| | | /FL = gb: K02581.1 gb: NM_003258.1 | | | | |
| 208193_at | interleukin 9 | gb: NM_000590.1 /DEF = Homo sapiens | IL9 | −1.0 | −1.0 | −1.0 |
| | | interleukin 9 (IL9), mRNA. /FEA = mRNA | | | | |
| | | /GEN = IL9 /PROD = interleukin 9 | | | | |
| | | /DB_XREF = gi: 10834979 /UG = Hs.960 | | | | |
| | | interleukin 9 /FL = gb: NM_000590.1 | | | | |
| | | gb: M30134.1 | | | | |
| 204646_at | dihydropyrimidine | gb: NM_000110.2 /DEF = Homo sapiens | DPYD | 1.8 | −1.3 | −1.4 |
| | dehydrogenase | dihydropyrimidine dehydrogenase (DPYD), | | | | |
| | | mRNA. /FEA = mRNA /GEN = DPYD | | | | |
| | | /PROD = dihydropyrimidine dehydrogenase | | | | |
| | | /DB_XREF = gi: 4557874 /UG = Hs.1602 | | | | |
| | | dihydropyrimidine dehydrogenase | | | | |
| | | /FL = gb: U20938.1 gb: NM_000110.2 | | | | |
| | | gb: U09178.1 gb: AB003063.1 | | | | |
| 208450_at | lectin, galactoside- | gb: NM_006498.1 /DEF = Homo sapiens | LGALS2 | 1.3 | −1.3 | −1.7 |
| | binding, soluble, 2 | lectin, galactoside-binding, soluble, 2 | | | | |
| | (galectin 2) | (galectin 2) (LGALS2), mRNA. /FEA = CDS | | | | |
| | | /GEN = LGALS2 /PROD = lectin, galactoside- | | | | |
| | | binding, soluble, 2(galectin 2) | | | | |
| | | /DB_XREF = gi: 5729902 /UG = Hs.113987 | | | | |
| | | lectin, galactoside-binding, soluble, 2 | | | | |
| | | (galectin 2) /FL = gb: M87842.1 | | | | |
| | | gb: NM_006498.1 | | | | |
| 221841_s_at | Kruppel-like factor | Consensus includes gb: BF514079 | KLF4 | 1.4 | −1.4 | −1.2 |
| | 4 (gut) | /FEA = EST /DB_XREF = gi: 11599258 | | | | |
| | | /DB_XREF = est: UI-H-BW1-amw-b-08-0- | | | | |
| | | UI.s1 /CLONE = IMAGE: 3071198 | | | | |
| | | /UG = Hs.7934 Kruppel-like factor 4 (gut) | | | | |
| 209773_s_at | ribonucleotide | gb: BC001886.1 /DEF = Homo sapiens, | RRM2 | −1.9 | −1.5 | −1.5 |
| | reductase M2 | ribonucleotide reductase M2 polypeptide, | | | | |
| | polypeptide | clone MGC: 1551, mRNA, complete cds. | | | | |
| | | /FEA = mRNA /PROD = ribonucleotide | | | | |
| | | reductase M2 polypeptide | | | | |
| | | /DB_XREF = gi: 12804874 /UG = Hs.75319 | | | | |
| | | ribonucleotide reductase M2 polypeptide | | | | |
| | | /FL = gb: BC001886.1 | | | | |
| 201202_at | proliferating cell | gb: NM_002592.1 /DEF = Homo sapiens | PCNA | 1.1 | −1.1 | −1.5 |
| | nuclear antigen | proliferating cell nuclear antigen (PCNA), | | | | |
| | | mRNA. /FEA = mRNA /GEN = PCNA | | | | |
| | | /PROD = proliferating cell nuclear antigen | | | | |
| | | /DB_XREF = gi: 4505640 /UG = Hs.78996 | | | | |
| | | proliferating cell nuclear antigen | | | | |
| | | /FL = gb: BC000491.1 gb: M15796.1 | | | | |
| | | gb: NM_002592.1 | | | | |
| 202705_at | cyclin B2 | gb: NM_004701.2 /DEF = Homo sapiens | CCNB2 | −1.0 | −1.3 | 1.0 |
| | | cyclin B2 (CCNB2), mRNA. /FEA = mRNA | | | | |
| | | /GEN = CCNB2 /PROD = cyclin B2 | | | | |
| | | /DB_XREF = gi: 10938017 /UG = Hs.194698 | | | | |
| | | cyclin B2 /FL = gb: NM_004701.2 | | | | |
| | | gb: AF002822.1 gb: AB020981.1 | | | | |
| | | gb: AL080146.1 | | | | |
| 214470_at | killer cell lectin-like | Consensus includes gb: NM_002258.1 | KLRB1 | 1.2 | 1.4 | −1.2 |
| | receptor subfamily | /DEF = Homo sapiens killer cell lectin-like | | | | |
| | B, member 1 | receptor subfamily B, member 1 (KLRB1), | | | | |
| | | mRNA. /FEA = CDS /GEN = KLRB1 | | | | |
| | | /PROD = killer cell lectin-like receptor | | | | |
| | | subfamily B, member 1 | | | | |
| | | /DB_XREF = gi: 4504878 /UG = Hs.169824 | | | | |
| | | killer cell lectin-like receptor subfamily B, | | | | |
| | | member 1 /FL = gb: NM_002258.1 | | | | |
| | | gb: U11276.1 | | | | |
| 205098_at | chemokine (C-C | Consensus includes gb: AI421071 | | 1.1 | −1.7 | −1.1 |
| | motif) receptor 1 | /FEA = EST /DB_XREF = gi: 4267002 | | | | |
| | | /DB_XREF = est: tf24a02.x1 | | | | |
| | | /CLONE = IMAGE: 2097098 | | | | |
| | | /UG = Hs.301921 chemokine (C-C motif) | | | | |
| | | receptor 1 /FL = gb: L09230.1 gb: L10918.1 | | | | |
| | | gb: NM_001295.1 | | | | |
| 210190_at | syntaxin 11 | gb: AF071504.1 /DEF = Homo sapiens | STX11 | −1.0 | −1.0 | −1.0 |
| | | syntaxin 11 mRNA, complete cds. | | | | |
| | | /FEA = mRNA /PROD = syntaxin 11 | | | | |
| | | /DB_XREF = gi: 3243239 /UG = Hs.118958 | | | | |
| | | syntaxin 11 /FL = gb: AF071504.1 | | | | |
| | | gb: AF044309.1 gb: AF038898.1 | | | | |
| | | gb: NM_003764.1 | | | | |
| 204438_at | mannose receptor, | gb: NM_002438.1 /DEF = Homo sapiens | MRC1 | 1.1 | −1.5 | −1.6 |
| | C type 1 | mannose receptor, C type 1 (MRC1), | | | | |
| | | mRNA. /FEA = mRNA /GEN = MRC1 | | | | |
| | | /PROD = mannose receptor, C type 1 | | | | |
| | | /DB_XREF = gi: 4505244 /UG = Hs.75182 | | | | |
| | | mannose receptor, C type 1 | | | | |
| | | /FL = gb: J05550.1 gb: NM_002438.1 | | | | |
| 221898_at | lung type-I cell | Consensus includes gb: AU154455 | T1A-2 | −53.7 | −1.0 | −1.0 |
| | membrane- | /FEA = EST /DB_XREF = gi: 11015976 | | | | |
| | associated | /DB_XREF = est: AU154455 | | | | |
| | glycoprotein | /CLONE = NT2RP4001145 /UG = Hs.135150 | | | | |
| | | lung type-I cell membrane-associated | | | | |
| | | glycoprotein | | | | |
| 205354_at | guanidinoacetate N [symbol] | gb: NM_000156.3 /DEF = Homo sapiens | GAMT | −1.0 | −1.0 | −1.0 |
| | methyltransferase | guanidinoacetate N-methyltransferase | | | | |
| | | (GAMT), mRNA. /FEA = mRNA | | | | |
| | | /GEN = GAMT /PROD = guanidinoacetate N- | | | | |
| | | methyltransferase /DB_XREF = gi: 7549759 | | | | |
| | | /UG = Hs.81131 guanidinoacetate N- | | | | |
| | | methyltransferase /FL = gb: NM_000156.3 | | | | |
| 202888_s_at | alanyl (membrane) | gb: NM_001150.1 /DEF = Homo sapiens | ANPEP | −1.2 | −1.2 | 1.1 |
| | aminopeptidase | alanyl (membrane) aminopeptidase | | | | |
| | (aminopeptidase | (aminopeptidase N, aminopeptidase M, | | | | |
| | N, aminopeptidase | microsomal aminopeptidase, CD13, p150) | | | | |
| | M, microsomal | (ANPEP), mRNA. /FEA = mRNA | | | | |
| | aminopeptidase, | /GEN = ANPEP /PROD = membrane alanine | | | | |
| | CD13, p150) | aminopeptidase precursor | | | | |
| | | /DB_XREF = gi: 4502094 /UG = Hs.1239 | | | | |
| | | alanyl (membrane) aminopeptidase | | | | |
| | | (aminopeptidase N, aminopeptidase M, | | | | |
| | | microsomal aminopeptidase, CD13, p150) | | | | |
| | | /FL = gb: M22324.1 gb: NM_001150.1 | | | | |
| 211962_s_at | zinc finger protein | Consensus includes gb: BG250310 | | 1.7 | 1.1 | 1.0 |
| | 36, C3H type-like 1 | /FEA = EST /DB_XREF = gi: 12760126 | | | | |
| | | /DB_XREF = est: 602362443F1 | | | | |
| | | /CLONE = IMAGE: 4470898 /UG = Hs.85155 | | | | |
| | | butyrate response factor 1 (EGF-response | | | | |
| | | factor 1) | | | | |
| 200862_at | 24- | gb: NM_014762.1 /DEF = Homo sapiens | DHCR24 | 1.2 | −1.3 | −1.2 |
| | dehydrocholesterol | seladin-1 (KIAA0018), mRNA. | | | | |
| | reductase | /FEA = mRNA /GEN = KIAA0018 | | | | |
| | | /PROD = seladin-1 | | | | |
| | | /DB_XREF = gi: 13375617 /UG = Hs.75616 | | | | |
| | | seladin-1 /FL = gb: AF261758.1 | | | | |
| | | gb: BC004375.1 gb: NM_014762.1 | | | | |
| 217755_at | hematological and | gb: NM_016185.1 /DEF = Homo sapiens | HN1 | 1.0 | 1.1 | −1.2 |
| | neurological | hematological and neurological expressed | | | | |
| | expressed 1 | 1 (HN1), mRNA. /FEA = mRNA/GEN = HN1 | | | | |
| | | /PROD = hematological and neurological | | | | |
| | | expressed 1 /DB_XREF = gi: 7705876 | | | | |
| | | /UG = Hs.109706 hematological and | | | | |
| | | neurological expressed 1 | | | | |
| | | /FL = gb: AF060925.1 gb: BC001420.1 | | | | |
| | | gb: AF177862.1 gb: NM_016185.1 | | | | |
| 205235_s_at | M-phase | gb: NM_016195.1 /DEF = Homo sapiens M- | MPHOSPH1 | 1.6 | −55.4 | −67.1 |
| | phosphoprotein 1 | phase phosphoprotein 1 (MPHOSPH1), | | | | |
| | | mRNA. /FEA = mRNA /GEN = MPHOSPH1 | | | | |
| | | /PROD = M-phase phosphoprotein 1 | | | | |
| | | /DB_XREF = gi: 7705347 /UG = Hs.240 M- | | | | |
| | | phase phosphoprotein 1 | | | | |
| | | /FL = gb: AL117496.1 gb: NM_016195.1 | | | | |
| 219841_at | activation-induced | gb: NM_020661.1 /DEF = Homo sapiens | AICDA | −1.0 | −1.0 | −1.0 |
| | cytidine deaminase | activation-induced cytidine deaminase | | | | |
| | | (AICDA), mRNA. /FEA = mRNA | | | | |
| | | /GEN = AICDA /PROD = activation-induced | | | | |
| | | cytidine deaminase | | | | |
| | | /DB_XREF = gi: 10190699 /UG = Hs.149342 | | | | |
| | | activation-induced cytidine deaminase | | | | |
| | | /FL = gb: NM_020661.1 gb: AB040431.1 | | | | |
| 205403_at | interleukin 1 | gb: NM_004633.1 /DEF = Homo sapiens | IL1R2 | 1.8 | −1.0 | −50.5 |
| | receptor, type II | interleukin 1 receptor, type II (IL1R2), | | | | |
| | | mRNA. /FEA = mRNA /GEN = IL1R2 | | | | |
| | | /PROD = interleukin 1 receptor, type II | | | | |
| | | /DB_XREF = gi: 4758597 /UG = Hs.25333 | | | | |
| | | interleukin 1 receptor, type II | | | | |
| | | /FL = gb: U74649.1 gb: NM_004633.1 | | | | |
| 205016_at | transforming | gb: NM_003236.1 /DEF = Homo sapiens | TGFA | −1.3 | −1.1 | 1.7 |
| | growth factor, | transforming growth factor, alpha (TGFA), | | | | |
| | alpha | mRNA. /FEA = mRNA /GEN = TGFA | | | | |
| | | /PROD = transforming growth factor, alpha | | | | |
| | | /DB_XREF = gi: 4507460 /UG = Hs.170009 | | | | |
| | | transforming growth factor, alpha | | | | |
| | | /FL = gb: BC005308.1 gb: M31172.1 | | | | |
| | | gb: K03222.1 gb: NM_003236.1 | | | | |
| 201438_at | collagen, type VI, | gb: NM_004369.1 /DEF = Homo sapiens | COL6A3 | −1.0 | −1.0 | −1.0 |
| | alpha 3 | collagen, type VI, alpha 3 (COL6A3), | | | | |
| | | mRNA. /FEA = mRNA /GEN = COL6A3 | | | | |
| | | /PROD = collagen, type VI, alpha 3 | | | | |
| | | /DB_XREF = gi: 4758027 /UG = Hs.80988 | | | | |
| | | collagen, type VI, alpha 3 | | | | |
| | | /FL = gb: NM_004369.1 | | | | |
| 203270_at | deoxythymidylate | gb: NM_012145.1 /DEF = Homo sapiens | DTYMK | 60.6 | 1.1 | −73.1 |
| | kinase (thymidylate | deoxythymidylate kinase (thymidylate | | | | |
| | kinase) | kinase) (DTYMK), mRNA. /FEA = mRNA | | | | |
| | | /GEN = DTYMK /PROD = deoxythymidylate | | | | |
| | | kinase (thymidylate kinase) | | | | |
| | | /DB_XREF = gi: 6912339 /UG = Hs.79006 | | | | |
| | | deoxythymidylate kinase (thymidylate | | | | |
| | | kinase) /FL = gb: BC001827.1 gb: L16991.1 | | | | |
| | | gb: NM_012145.1 | | | | |
| 219024_at | pleckstrin | gb: NM_021622.1 /DEF = Homo sapiens | PLEKHA1 | 1.4 | 1.0 | 1.1 |
| | homology domain | pleckstrin homology domain-containing, | | | | |
| | containing, family A | family A (phosphoinositide binding | | | | |
| | (phosphoinositide | specific) member 1 (PLEKHA1), mRNA. | | | | |
| | binding specific) | /FEA = mRNA /GEN = PLEKHA1 | | | | |
| | member 1 | /PROD = pleckstrin homology domain- | | | | |
| | | containing, family A(phosphoinositide | | | | |
| | | binding specific) member 1 | | | | |
| | | /DB_XREF = gi: 11055985 /UG = Hs.17757 | | | | |
| | | pleckstrin homology domain-containing, | | | | |
| | | family A (phosphoinositide binding | | | | |
| | | specific) member 1 /FL = gb: AF286160.1 | | | | |
| | | gb: NM_021622.1 gb: BC001136.1 | | | | |
| 204822_at | TTK protein kinase | gb: NM_003318.1 /DEF = Homo sapiens | | −1.0 | 0.8 | −1.0 |
| | | TTK protein kinase (TTK), mRNA. | | | | |
| | | /FEA = mRNA /GEN = TTK /PROD = TTK | | | | |
| | | protein kinase /DB_XREF = gi: 4507718 | | | | |
| | | /UG = Hs.169840 TTK protein kinase | | | | |
| | | /FL = gb: BC000633.1 gb: M86699.1 | | | | |
| | | gb: NM_003318.1 | | | | |
| 212672_at | ataxia | Consensus includes gb: U82828 | ATM | 2.1 | 1.0 | −1.1 |
| | telangiectasia | /DEF = Homo sapiens ataxia telangiectasia | | | | |
| | mutated (includes | (ATM) gene, complete cds /FEA = mRNA_1 | | | | |
| | complementation | /DB_XREF = gi: 2304970 /UG = Hs.194382 | | | | |
| | groups A, C and D) | ataxia telangiectasia mutated (includes | | | | |
| | | complementation groups A, C and D) | | | | |
| 207067_s_at | histidine | gb: NM_002112.1 /DEF = Homo sapiens | HDC | −1.3 | 1.0 | −1.2 |
| | decarboxylase | histidine decarboxylase (HDC), mRNA. | | | | |
| | | /FEA = mRNA /GEN = HDC /PROD = histidine | | | | |
| | | decarboxylase /DB_XREF = gi: 4504364 | | | | |
| | | /UG = Hs.1481 histidine decarboxylase | | | | |
| | | /FL = gb: M60445.1 gb: NM_002112.1 | | | | |
| 205639_at | acyloxyacyl | gb: NM_001637.1 /DEF = Homo sapiens | AOAH | 1.1 | −1.3 | 1.1 |
| | hydrolase | acyloxyacyl hydrolase (neutrophil) | | | | |
| | (neutrophil) | (AOAH), mRNA. /FEA = mRNA | | | | |
| | | /GEN = AOAH /PROD = acyloxyacyl | | | | |
| | | hydrolase precursor | | | | |
| | | /DB_XREF = gi: 4502114 /UG = Hs.82542 | | | | |
| | | acyloxyacyl hydrolase (neutrophil) | | | | |
| | | /FL = gb: M62840.1 gb: NM_001637.1 | | | | |
| 220088_at | G protein-coupled | gb: NM_001736.1 /DEF = Homo sapiens | C5R1 | 1.2 | −1.1 | 1.1 |
| | receptor 77 | complement component 5 receptor 1 (C5a | | | | |
| | | ligand) (C5R1), mRNA. /FEA = mRNA | | | | |
| | | /GEN = C5R1 /PROD = complement | | | | |
| | | component 5 receptor 1 (C5a ligand) | | | | |
| | | /DB_XREF = gi: 4502508 /UG = Hs.2161 | | | | |
| | | complement component 5 receptor 1 (C5a | | | | |
| | | ligand) /FL = gb: M62505.1 | | | | |
| | | gb: NM_001736.1 | | | | |
| 204614_at | serine (or cysteine) | gb: NM_002575.1 /DEF = Homo sapiens | SERPINB2 | 1.4 | 1.2 | 1.3 |
| | proteinase | serine (or cysteine) proteinase inhibitor, | | | | |
| | inhibitor, clade B | clade B (ovalbumin), member 2 | | | | |
| | (ovalbumin), | (SERPINB2), mRNA. /FEA = mRNA | | | | |
| | member 2 | /GEN = SERPINB2 /PROD = serine (or | | | | |
| | | cysteine) proteinase inhibitor, cladeB | | | | |
| | | (ovalbumin), member 2 | | | | |
| | | /DB_XREF = gi: 4505594 /UG = Hs.75716 | | | | |
| | | serine (or cysteine) proteinase inhibitor, | | | | |
| | | clade B (ovalbumin), member 2 | | | | |
| | | /FL = gb: J02685.1 gb: J03603.1 | | | | |
| | | gb: M18082.1 gb: NM_002575.1 | | | | |
| 209921_at | solute carrier | gb: AB040875.1 /DEF = Homo sapiens | SLC7A11 | 1.2 | 1.1 | −1.2 |
| | family 7, (cationic | hxCT mRNA for cystineglutamate | | | | |
| | amino acid | exchanger, complete cds. /FEA = mRNA | | | | |
| | transporter, y+ | /GEN = hxCT /PROD = cystineglutamate | | | | |
| | system) member | exchanger /DB_XREF = gi: 13516845 | | | | |
| | 11 | /UG = Hs.6682 solute carrier family 7, | | | | |
| | | (cationic amino acid transporter, y+ | | | | |
| | | system) member 11 /FL = gb: AB040875.1 | | | | |
| 208863_s_at | splicing factor, | gb: M72709.1 /DEF = Human alternative | SFRS1 | 1.6 | 1.1 | 1.5 |
| | arginine/serine-rich | splicing factor mRNA, complete cds. | | | | |
| | 1 (splicing factor 2, | /FEA = mRNA /DB_XREF = gi: 179073 | | | | |
| | alternate splicing | /UG = Hs.73737 splicing factor, | | | | |
| | factor) | arginineserine-rich 1 (splicing factor 2, alternate splicing factor) /FL = gb: | | | | |
| | | M72709.1 | | | | |
| 205174_s_at | glutaminyl-peptide | gb: NM_012413.2 /DEF = Homo sapiens | QPCT | 1.2 | −1.6 | −1.2 |
| | cyclotransferase | glutaminyl-peptide cyclotransferase | | | | |
| | (glutaminyl | (glutaminyl cyclase) (QPCT), mRNA. | | | | |
| | cyclase) | /FEA = mRNA /GEN = QPCT | | | | |
| | | /PROD = glutaminyl-peptide | | | | |
| | | cyclotransferase precursor | | | | |
| | | /DB_XREF = gi: 9257235 /UG = Hs.79033 | | | | |
| | | glutaminyl-peptide cyclotransferase | | | | |
| | | (glutaminyl cyclase) /FL = gb: NM_012413.2 | | | | |
| 207038_at | solute carrier | gb: NM_004694.1 /DEF = Homo sapiens | SLC16A6 | 1.1 | 1.0 | 1.3 |
| | family 16 | solute carrier family 16 (monocarboxylic | | | | |
| | (monocarboxylic | acid transporters), member 6 (SLC16A6), | | | | |
| | acid transporters), | mRNA. /FEA = mRNA /GEN = SLC16A6 | | | | |
| | member 6 | /PROD = solute carrier family 16 | | | | |
| | | (monocarboxylic acidtransporters), | | | | |
| | | member 6 /DB_XREF = gi: 4759117 | | | | |
| | | /UG = Hs.114924 solute carrier family 16 | | | | |
| | | (monocarboxylic acid transporters), | | | | |
| | | member 6 /FL = gb: U79745.1 | | | | |
| | | gb: NM_004694.1 | | | | |
| 204039_at | CCAAT/enhancer | gb: NM_004364.1 /DEF = Homo sapiens | CEBPA | 1.3 | −1.1 | 1.1 |
| | binding protein | CCAATenhancer binding protein (CEBP), | | | | |
| | (C/EBP), alpha | alpha (CEBPA), mRNA. /FEA = mRNA | | | | |
| | | /GEN = CEBPA /PROD = CCAATenhancer | | | | |
| | | binding protein (CEBP), alpha | | | | |
| | | /DB_XREF = gi: 4757971 /UG = Hs.76171 | | | | |
| | | CCAATenhancer binding protein (CEBP), | | | | |
| | | alpha /FL = gb: NM_004364.1 | | | | |
| 217786_at | SKB1 homolog (S. pombe) | gb: NM_006109.1 /DEF = Homo sapiens | SKB1 | 1.5 | 1.1 | 1.0 |
| | | skb1 (S. pombe) homolog (SKB1), mRNA. | | | | |
| | | /FEA = mRNA /GEN = SKB1 /PROD = skb1 | | | | |
| | | (S. pombe) homolog | | | | |
| | | /DB_XREF = gi: 5174682 /UG = Hs.12912 | | | | |
| | | skb1 (S. pombe) homolog | | | | |
| | | /FL = gb: AF015913.1 gb: NM_006109.1 | | | | |
| | | gb: AF167572.1 | | | | |
| 201710_at | v-myb | gb: NM_002466.1 /DEF = Homo sapiens v- | MYBL2 | −1.0 | −1.0 | −1.0 |
| | myeloblastosis | myb avian myeloblastosis viral oncogene | | | | |
| | viral oncogene | homolog-like 2 (MYBL2), mRNA. | | | | |
| | homolog (avian)- | /FEA = mRNA /GEN = MYBL2 /PROD = v- | | | | |
| | like 2 | myb avian myeloblastosis viral | | | | |
| | | oncogenehomolog-like 2 | | | | |
| | | /DB_XREF = gi: 4505292 /UG = Hs.179718 v- | | | | |
| | | myb avian myeloblastosis viral oncogene | | | | |
| | | homolog-like 2 /FL = gb: NM_002466.1 | | | | |
| 204693_at | CDC42 effector | gb: NM_007061.1 /DEF = Homo sapiens | CDC42EP1 | −1.1 | −88.6 | 1.0 |
| | protein (Rho | serum constituent protein (MSE55), | | | | |
| | GTPase binding) 1 | mRNA. /FEA = mRNA /GEN = MSE55 | | | | |
| | | /PROD = serum constituent protein | | | | |
| | | /DB_XREF = gi: 5902007 /UG = Hs.148101 | | | | |
| | | serum constituent protein | | | | |
| | | /FL = gb: M88338.1 gb: NM_007061.1 | | | | |
| 205786_s_at | integrin, alpha M | gb: NM_000632.2 /DEF = Homo sapiens | ITGAM | 1.0 | −1.2 | −1.6 |
| | (complement | integrin, alpha M (complement component | | | | |
| | component | receptor 3, alpha; also known as CD11b | | | | |
| | receptor 3, alpha; | (p170), macrophage antigen alpha | | | | |
| | also known as | polypeptide) (ITGAM), mRNA. | | | | |
| | CD11b (p170), | /FEA = mRNA /GEN = ITGAM | | | | |
| | macrophage | /PROD = integrin alpha M precursor | | | | |
| | antigen alpha | /DB_XREF = gi: 6006013 /UG = Hs.172631 | | | | |
| | polypeptide) | integrin, alpha M (complement component | | | | |
| | | receptor 3, alpha; also known as CD11b | | | | |
| | | (p170), macrophage antigen alpha | | | | |
| | | polypeptide) /FL = gb: J03925.1 | | | | |
| | | gb: NM_000632.2 | | | | |
| 209172_s_at | centromere protein | gb: U30872.1 /DEF = Human mitosin | CENPF | −1.0 | −1.0 | −1.0 |
| | F, 350/400ka | mRNA, complete cds. /FEA = mRNA | | | | |
| | (mitosin) | /PROD = mitosin /DB_XREF = gi: 1000093 | | | | |
| | | /UG = Hs.77204 centromere protein F | | | | |
| | | (350400 kD, mitosin) /FL = gb: U30872.1 | | | | |
| 201360_at | cystatin C (amyloid | gb: NM_000099.1 /DEF = Homo sapiens | CST3 | 1.0 | −1.3 | −1.3 |
| | angiopathy and | cystatin C (amyloid angiopathy and | | | | |
| | cerebral | cerebral hemorrhage) (CST3), mRNA. | | | | |
| | hemorrhage) | /FEA = mRNA /GEN = CST3 | | | | |
| | | /PROD = cystatin C (amyloid angiopathy | | | | |
| | | and cerebralhemorrhage) | | | | |
| | | /DB_XREF = gi: 4503106 /UG = Hs.135084 | | | | |
| | | cystatin C (amyloid angiopathy and | | | | |
| | | cerebral hemorrhage) | | | | |
| | | /FL = gb: NM_000099.1 | | | | |
| 216537_s_at | sialic acid binding | Consensus includes gb: AJ130713.1 | SIGLEC7 | 1.1 | 1.7 | 1.0 |
| | Ig-like lectin 7 | /DEF = Homo sapiens mRNA for QA79 | | | | |
| | | membrane protein, splice product airm-1. | | | | |
| | | /FEA = mRNA /GEN = airm /PROD = QA79 | | | | |
| | | membrane protein, splice product airm-1 | | | | |
| | | /DB_XREF = gi: 5541875 /UG = Hs.274470 | | | | |
| | | sialic acid binding Ig-like lectin 7 | | | | |
| 206682_at | C-type (calcium | gb: NM_006344.1 /DEF = Homo sapiens | CLECSF14 | 1.3 | −1.2 | −1.4 |
| | dependent, | macrophage lectin 2 (calcium dependent) | | | | |
| | carbohydrate- | (HML2), mRNA. /FEA = mRNA | | | | |
| | recognition | /GEN = HML2 /PROD = macrophage lectin 2 | | | | |
| | domain) lectin, | (calcium dependent) | | | | |
| | superfamily | /DB_XREF = gi: 5453683 /UG = Hs.54403 | | | | |
| | member 14 | macrophage lectin 2 (calcium dependent) | | | | |
| | (macrophage- | /FL = gb: D50532.1 gb: NM_006344.1 | | | | |
| | derived) | | | | | |
| 201739_at | serum/glucocorticoid | gb: NM_005627.1 /DEF = Homo sapiens | SGK | 1.3 | 1.0 | 1.0 |
| | regulated kinase | serumglucocorticoid regulated kinase | | | | |
| | | (SGK), mRNA. /FEA = mRNA /GEN = SGK | | | | |
| | | /PROD = serumglucocorticoid regulated | | | | |
| | | kinase /DB_XREF = gi: 5032090 | | | | |
| | | /UG = Hs.296323 serumglucocorticoid | | | | |
| | | regulated kinase /FL = gb: BC001263.1 | | | | |
| | | gb: NM_005627.1 gb: AF153609.1 | | | | |
| 209825_s_at | uridine | gb: BC002906.1 /DEF = Homo sapiens, | UCK2 | 1.0 | 1.0 | 68.1 |
| | monophosphate | Similar to uridine monophosphate kinase, | | | | |
| | kinase | clone MGC: 10318, mRNA, complete cds. | | | | |
| | | /FEA = mRNA /PROD = Similar to uridine | | | | |
| | | monophosphate kinase | | | | |
| | | /DB_XREF = gi: 12804106 /UG = Hs.75939 | | | | |
| | | uridine monophosphate kinase | | | | |
| | | /FL = gb: BC002906.1 gb: AF236637.1 | | | | |
| 219371_s_at | Kruppel-like factor | gb: NM_016270.1 /DEF = Homo sapiens | KLF2 | 1.1 | 1.1 | 1.0 |
| | 2 (lung) | Kruppel-like factor (LOC51713), mRNA. | | | | |
| | | /FEA = mRNA /GEN = LOC51713 | | | | |
| | | /PROD = Kruppel-like factor | | | | |
| | | /DB_XREF = gi: 7706468 /UG = Hs.107740 | | | | |
| | | Kruppel-like factor 2 (lung) | | | | |
| | | /FL = gb: AF134053.1 gb: AF205849.1 | | | | |
| | | gb: NM_016270.1 | | | | |
| 209696_at | fructose-1,6- | gb: D26054.1 /DEF = Human mRNA for | FBP1 | 1.0 | −1.5 | −1.4 |
| | bisphosphatase 1 | fructose-1,6-bisphosphatase, complete | | | | |
| | | cds. /FEA = mRNA /PROD = fructose-1,6- | | | | |
| | | bisphosphatase /DB_XREF = gi: 439225 | | | | |
| | | /UG = Hs.574 fructose-1,6-bisphosphatase | | | | |
| | | 1 /FL = gb: M19922.1 gb: L10320.1 | | | | |
| | | gb: D26054.1 gb: D26055.1 gb: D26056.1 | | | | |
| | | gb: NM_000507.1 | | | | |
| 209949_at | neutrophil cytosolic | gb: BC001606.1 /DEF = Homo sapiens, | NCF2 | 1.2 | −1.4 | −1.5 |
| | factor 2 (65 kDa, | Similar to neutrophil cytosolic factor 2 | | | | |
| | chronic | (65 kD, chronic granulomatous disease, | | | | |
| | granulomatous | autosomal 2), clone MGC: 2275, mRNA, | | | | |
| | disease, autosomal | complete cds. /FEA = mRNA | | | | |
| | 2) | /PROD = Similar to neutrophil cytosolic | | | | |
| | | factor 2 (65 kD, chronic granulomatous | | | | |
| | | disease, autosomal 2) | | | | |
| | | /DB_XREF = gi: 12804408 /UG = Hs.949 | | | | |
| | | neutrophil cytosolic factor 2 (65 kD, chronic | | | | |
| | | granulomatous disease, autosomal 2) | | | | |
| | | /FL = gb: BC001606.1 gb: M32011.1 | | | | |
| | | gb: NM_000433.1 | | | | |
| 210220_at | frizzled homolog 2 | gb: L37882.1 /DEF = Human frizzled gene | FZD2 | −1.2 | 1.1 | 1.0 |
| | (Drosophila) | product mRNA, complete cds. | | | | |
| | | /FEA = mRNA /GEN = frizzled | | | | |
| | | /DB_XREF = gi: 736678 /UG = Hs.81217 | | | | |
| | | frizzled (Drosophila) homolog 2 | | | | |
| | | /FL = gb: AB017364.1 gb: NM_001466.2 | | | | |
| | | gb: L37882.1 | | | | |
| 205718_at | integrin, beta 7 | gb: NM_000889.1 /DEF = Homo sapiens | ITGB7 | 1.3 | 1.1 | −1.1 |
| | | integrin, beta 7 (ITGB7), mRNA. | | | | |
| | | /FEA = mRNA /GEN = ITGB7 | | | | |
| | | /PROD = integrin, beta 7 | | | | |
| | | /DB_XREF = gi: 4504776 /UG = Hs.1741 | | | | |
| | | integrin, beta 7 /FL = gb: M68892.1 | | | | |
| | | gb: M62880.1 gb: NM_000889.1 | | | | |
| 206999_at | interleukin 12 | gb: NM_001559.1 /DEF = Homo sapiens | IL12RB2 | 1.0 | 59.9 | −1.0 |
| | receptor, beta 2 | interleukin 12 receptor, beta 2 (IL12RB2), | | | | |
| | | mRNA. /FEA = mRNA /GEN = IL12RB2 | | | | |
| | | /PROD = interleukin 12 receptor, beta 2 | | | | |
| | | /DB_XREF = gi: 4504642 /UG = Hs.73165 | | | | |
| | | interleukin 12 receptor, beta 2 | | | | |
| | | /FL = gb: U64198.1 gb: NM_001559.1 | | | | |
| 203104_at | colony stimulating | gb: NM_005211.1 /DEF = Homo sapiens | CSF1R | 1.1 | −1.1 | 1.1 |
| | factor 1 receptor, | colony stimulating factor 1 receptor, | | | | |
| | formerly | formerly McDonough feline sarcoma viral | | | | |
| | McDonough feline | (v-fms) oncogene homolog (CSF1R), | | | | |
| | sarcoma viral (v- | mRNA. /FEA = mRNA /GEN = CSF1R | | | | |
| | fms) oncogene | /PROD = colony stimulating factor 1 | | | | |
| | homolog | receptor, formerlyMcDonough feline | | | | |
| | | sarcoma viral (v-fms) oncogene homolog | | | | |
| | | /DB_XREF = gi: 4885158 /UG = Hs.174142 | | | | |
| | | colony stimulating factor 1 receptor, | | | | |
| | | formerly McDonough feline sarcoma viral | | | | |
| | | (v-fms) oncogene homolog | | | | |
| | | /FL = gb: NM_005211.1 | | | | |
| 209661_at | kinesin family | gb: BC001211.1 /DEF = Homo sapiens, | KIFC3 | 1.1 | −1.3 | −1.4 |
| | member C3 | kinesin family member C3, clone | | | | |
| | | MGC: 3226, mRNA, complete cds. | | | | |
| | | /FEA = mRNA /PROD = kinesin family | | | | |
| | | member C3 /DB_XREF = gi: 12654738 | | | | |
| | | /UG = Hs.23131 kinesin family member C3 | | | | |
| | | /FL = gb: BC001211.1 gb: AF004426.1 | | | | |
| | | gb: NM_005550.1 | | | | |
| 221210_s_at | N- | gb: NM_030769.1 /DEF = Homo sapiens | NPL | 1.5 | −1.1 | 1.1 |
| | acetylneuraminate | hypothetical protein similar to swine | | | | |
| | pyruvate lyase | acylneuraminate lyase (C1ORF13), | | | | |
| | (dihydrodipicolinate | mRNA. /FEA = mRNA /GEN = C1ORF13 | | | | |
| | synthase) | /PROD = hypothetical protein similar to | | | | |
| | | swineacylneuraminate lyase | | | | |
| | | /DB_XREF = gi: 13540532 | | | | |
| | | /FL = gb: NM_030769.1 | | | | |
| 221748_s_at | tensin | Consensus includes gb: AL046979 | TNS | 1.2 | 1.0 | 1.8 |
| | | /FEA = EST /DB_XREF = gi: 5435035 | | | | |
| | | /DB_XREF = est: DKFZp586K0617_s1 | | | | |
| | | /CLONE = DKFZp586K0617 /UG = Hs.9973 | | | | |
| | | tensin | | | | |
| 202878_s_at | complement | gb: NM_012072.2 /DEF = Homo sapiens | C1QR1 | 1.2 | 1.2 | 1.2 |
| | component 1, q | complement component C1q receptor | | | | |
| | subcomponent, | (C1QR), mRNA. /FEA = mRNA | | | | |
| | receptor 1 | /GEN = C1QR /PROD = complement | | | | |
| | | component C1q receptor | | | | |
| | | /DB_XREF = gi: 11496985 /UG = Hs.97199 | | | | |
| | | complement component C1q receptor | | | | |
| | | /FL = gb: NM_012072.2 gb: U94333.1 | | | | |
| 210152_at | leukocyte | gb: U82979.1 /DEF = Human | LILRB4 | −1.3 | −1.3 | −1.2 |
| | immunoglobulin- | immunoglobulin-like transcript-3 mRNA, | | | | |
| | like receptor, | complete cds. /FEA = mRNA | | | | |
| | subfamily B (with | /PROD = immunoglobulin-like transcript-3 | | | | |
| | TM and ITIM | /DB_XREF = gi: 1857460 /UG = Hs.67846 | | | | |
| | domains), member 4 | leukocyte immunoglobulin-like receptor, | | | | |
| | | subfamily B (with TM and ITIM domains), | | | | |
| | | member 4 /FL = gb: U82979.1 gb: U91925.1 | | | | |
| | | gb: AF025532.1 gb: NM_006847.1 | | | | |
| 219306_at | kinesin-like 7 | gb: NM_020242.1 /DEF = Homo sapiens | KNSL7 | −1.0 | −1.0 | −1.0 |
| | | kinesin-like protein 2 (hklp2), mRNA. | | | | |
| | | /FEA = mRNA /GEN = hklp2 /PROD = kinesin- | | | | |
| | | like protein 2 /DB_XREF = gi: 9910265 | | | | |
| | | /UG = Hs.150587 kinesin-like protein 2 | | | | |
| | | /FL = gb: AB035898.1 gb: NM_020242.1 | | | | |
| 208075_s_at | chemokine (C-C | gb: NM_006273.2 /DEF = Homo sapiens | | −1.0 | −1.0 | −1.0 |
| | motif) ligand 7 | small inducible cytokine A7 (monocyte | | | | |
| | | chemotactic protein 3) (SCYA7), mRNA. | | | | |
| | | /FEA = mRNA /GEN = SCYA7 | | | | |
| | | /PROD = monocyte chemotactic protein 3 | | | | |
| | | precursor /DB_XREF = gi: 13435401 | | | | |
| | | /FL = gb: NM_006273.2 | | | | |
| 204959_at | myeloid cell | gb: NM_002432.1 /DEF = Homo sapiens | MNDA | 1.1 | −1.5 | −1.5 |
| | nuclear | myeloid cell nuclear differentiation antigen | | | | |
| | differentiation | (MNDA), mRNA. /FEA = mRNA | | | | |
| | antigen | /GEN = MNDA /PROD = myeloid cell nuclear | | | | |
| | | differentiation antigen | | | | |
| | | /DB_XREF = gi: 4505226 /UG = Hs.153837 | | | | |
| | | myeloid cell nuclear differentiation antigen | | | | |
| | | /FL = gb: NM_002432.1 gb: M81750.1 | | | | |
| 201849_at | BCL2/adenovirus | gb: NM_004052.2 /DEF = Homo sapiens | BNIP3 | 1.6 | 1.0 | −1.3 |
| | E1B 19 kDa | BCL2adenovirus E1B 19 kD-interacting | | | | |
| | interacting protein 3 | protein 3 (BNIP3), nuclear gene encoding | | | | |
| | | mitochondrial protein, mRNA. | | | | |
| | | /FEA = mRNA /GEN = BNIP3 | | | | |
| | | /PROD = BCL2adenovirus E1B 19 kD- | | | | |
| | | interacting protein 3 | | | | |
| | | /DB_XREF = gi: 7669480 /UG = Hs.79428 | | | | |
| | | BCL2adenovirus E1B 19 kD-interacting | | | | |
| | | protein 3 /FL = gb: AF002697.1 gb: U15174.1 | | | | |
| | | gb: NM_004052.2 | | | | |
| 203554_x_at | pituitary tumor- | gb: NM_004219.2 /DEF = Homo sapiens | PTTG1 | −1.5 | −1.2 | −1.2 |
| | transforming 1 | pituitary tumor-transforming 1 (PTTG1), | | | | |
| | | mRNA. /FEA = mRNA /GEN = PTTG1 | | | | |
| | | /PROD = pituitary tumor-transforming | | | | |
| | | protein 1 /DB_XREF = gi: 11038651 | | | | |
| | | /UG = Hs.252587 pituitary tumor- | | | | |
| | | transforming 1 /FL = gb: NM_004219.2 | | | | |
| | | gb: AF095287.1 gb: AF062649.1 | | | | |
| | | gb: AF075242.1 | | | | |
| 214453_s_at | interferon-induced | Consensus includes gb: NM_006417.1 | IFI44 | 1.4 | −4.9 | 1.1 |
| | protein 44 | /DEF = Homo sapiens interferon-induced, | | | | |
| | | hepatitis C-associated microtubular | | | | |
| | | aggregate protein (44 kD) (MTAP44), | | | | |
| | | mRNA. /FEA = CDS /GEN = MTAP44 | | | | |
| | | /PROD = interferon-induced, hepatitis C- | | | | |
| | | associatedmicrotubular aggregate protein | | | | |
| | | (44 kD) /DB_XREF = gi: 5453743 | | | | |
| | | /UG = Hs.82316 interferon-induced, | | | | |
| | | hepatitis C-associated microtubular | | | | |
| | | aggregate protein (44 kD) | | | | |
| | | /FL = gb: NM_006417.1 | | | | |
| 209774_x_at | chemokine (C—X—C | gb: M57731.1 /DEF = Human gro-beta | CXCL2 | 1.3 | 1.1 | 1.4 |
| | motif) ligand 2 | mRNA, complete cds. /FEA = mRNA | | | | |
| | | /GEN = gro-beta /PROD = cytokine gro-beta | | | | |
| | | /DB_XREF = gi: 183626 /UG = Hs.75765 | | | | |
| | | GRO2 oncogene /FL = gb: M57731.1 | | | | |
| | | gb: M36820.1 gb: NM_002089.1 | | | | |
| 219386_s_at | SLAM family | gb: NM_020125.1 /DEF = Homo sapiens | SLAMF8 | −1.2 | −1.3 | −2.1 |
| | member 8 | BCM-like membrane protein precursor | | | | |
| | | (SBBI42), mRNA. /FEA = mRNA | | | | |
| | | /GEN = SBBI42 /PROD = BCM-like | | | | |
| | | membrane protein precursor | | | | |
| | | /DB_XREF = gi: 9910341 /UG = Hs.20450 | | | | |
| | | BCM-like membrane protein precursor | | | | |
| | | /FL = gb: AF144235.1 gb: NM_014036.1 | | | | |
| | | gb: AF146761.1 gb: NM_020125.1 | | | | |
| 210215_at | transferrin receptor 2 | gb: AF067864.1 /DEF = Homo sapiens | TFR2 | −1.0 | −1.0 | −1.0 |
| | | transferrin receptor 2 alpha (TFR2) | | | | |
| | | mRNA, complete cds. /FEA = mRNA | | | | |
| | | /GEN = TFR2 /PROD = transferrin receptor 2 | | | | |
| | | alpha /DB_XREF = gi: 5596369 | | | | |
| | | /UG = Hs.63758 transferrin receptor 2 | | | | |
| | | /FL = gb: AF067864.1 | | | | |
| 210184_at | integrin, alpha X | gb: M81695.1 /DEF = H. sapiens leukocyte | ITGAX | 1.1 | 1.0 | −1.2 |
| | (antigen CD11C | adhesion glycoprotein p150,95 mRNA, | | | | |
| | (p150), alpha | complete cds. /FEA = mRNA /GEN = ITGAX | | | | |
| | polypeptide) | /DB_XREF = gi: 487829 /UG = Hs.51077 | | | | |
| | | integrin, alpha X (antigen CD11C (p150), | | | | |
| | | alpha polypeptide) /FL = gb: M81695.1 | | | | |
| | | gb: NM_000887.2 | | | | |
| 208079_s_at | serine/threonine | gb: NM_003158.1 /DEF = Homo sapiens | STK6 | −1.0 | −1.0 | 1.1 |
| | kinase 6 | serinethreonine kinase 6 (STK6), mRNA. | | | | |
| | | /FEA = mRNA /GEN = STK6 | | | | |
| | | /PROD = serinethreonine kinase 6 | | | | |
| | | /DB_XREF = gi: 4507278 /UG = Hs.250822 | | | | |
| | | serinethreonine kinase 6 /FL = gb: D84212.1 | | | | |
| | | gb: NM_003158.1 | | | | |
| 205237_at | ficolin | gb: NM_002003.2 /DEF = Homo sapiens | FCN1 | −1.2 | −1.2 | 1.0 |
| | (collagen/fibrinogen | ficolin (collagenfibrinogen domain- | | | | |
| | domain | containing) 1 (FCN1), mRNA. | | | | |
| | containing) 1 | /FEA = mRNA /GEN = FCN1 /PROD = ficolin | | | | |
| | | 1 precursor /DB_XREF = gi: 8051583 | | | | |
| | | /UG = Hs.252136 ficolin (collagenfibrinogen | | | | |
| | | domain-containing) 1 /FL = gb: D83920.1 | | | | |
| | | gb: NM_002003.2 | | | | |
| 207645_s_at | chromodomain | gb: NM_004284.1 /DEF = Homo sapiens | CHD1L | −1.0 | −1.0 | −1.0 |
| | helicase DNA | chromodomain helicase DNA binding | | | | |
| | binding protein 1- | protein 1-like (CHD1L), mRNA. | | | | |
| | like | /FEA = mRNA /GEN = CHD1L | | | | |
| | | /PROD = chromodomain helicase DNA | | | | |
| | | binding protein1-like | | | | |
| | | /DB_XREF = gi: 4757977 /UG = Hs.159273 | | | | |
| | | chromodomain helicase DNA binding | | | | |
| | | protein 1-like /FL = gb: AF054177.1 | | | | |
| | | gb: NM_004284.1 | | | | |
| 210889_s_at | Fc fragment of IgG, | gb: M31933.1 /DEF = Human IgG low | FCGR2B | 1.2 | −1.2 | 1.0 |
| | low affinity IIb, | affinity Fc fragment receptor (FcRIIb3) | | | | |
| | receptor for (CD32) | mRNA, complete cds. /FEA = mRNA | | | | |
| | | /DB_XREF = gi: 182598 /UG = Hs.278443 Fc | | | | |
| | | fragment of IgG, low affinity IIb, receptor | | | | |
| | | for (CD32) /FL = gb: M31933.1 | | | | |
| 209875_s_at | secreted | gb: M83248.1 /DEF = Human nephropontin | SPP1 | −1.4 | 1.2 | 1.2 |
| | phosphoprotein 1 | mRNA, complete cds. /FEA = mRNA | | | | |
| | (osteopontin, bone | /GEN = nephropontin /PROD = nephropontin | | | | |
| | sialoprotein I, early | /DB_XREF = gi: 189150 /UG = Hs.313 | | | | |
| | T-lymphocyte | secreted phosphoprotein 1 (osteopontin, | | | | |
| | activation 1) | bone sialoprotein I, early T-lymphocyte | | | | |
| | | activation 1) /FL = gb: M83248.1 | | | | |
| 205686_s_at | CD86 antigen | gb: NM_006889.1 /DEF = Homo sapines | CD86 | 1.1 | −1.1 | 1.0 |
| | (CD28 antigen | CD86 antigen (CD28 antigen ligand 2, B7- | | | | |
| | ligand 2, B7-2 | 2 antigen) (CD86), mRNA. /FEA = mRNA | | | | |
| | antigen) | /GEN = CD86 /PROD = CD86 antigen (CD28 | | | | |
| | | antigen ligand 2, B7-2antigen) | | | | |
| | | /DB_XREF = gi: 5901919 /UG = Hs.27954 | | | | |
| | | CD86 antigen (CD28 antigen ligand 2, B7- | | | | |
| | | 2 antigen) /FL = gb: U04343.1 | | | | |
| | | gb: NM_006889.1 | | | | |
| 218075_at | achalasia, | gb: NM_015665.1 /DEF = Homo sapiens | AAAS | 1.1 | −1.2 | −1.4 |
| | adrenocortical | aladin (AAAS), mRNA. /FEA = mRNA | | | | |
| | insufficiency, | /GEN = AAAS /PROD = aladin | | | | |
| | alacrimia (Allgrove, | /DB_XREF = gi: 12962936 /UG = Hs.125262 | | | | |
| | triple-A) | aladin /FL = gb: BC000659.1 | | | | |
| | | gb: NM_015665.1 gb: AF226048.1 | | | | |
| 202240_at | polo-like kinase 1 | gb: NM_005030.1 /DEF = Homo sapiens | | | | |
| | (Drosophila) | polo (Drosophia)-like kinase (PLK), | | | | |
| | | mRNA. /FEA = mRNA /GEN = PLK | | | | |
| | | /PROD = polo (Drosophia)-like kinase | | | | |
| | | /DB_XREF = gi: 4826915 /UG = Hs.77597 | | | | |
| | | polo (Drosophia)-like kinase | | | | |
| | | /FL = gb: BC002369.1 gb: BC003002.1 | | | | |
| | | gb: U01038.1 gb: L19559.1 | | | | |
| | | gb: NM_005030.1 | | | | |
| 209392_at | ectonucleotide | gb: L35594.1 /DEF = Human autotaxin | ENPP2 | 1.0 | −2.1 | −1.7 |
| | pyrophosphatase/phosphodiesterase | mRNA, complete cds. /FEA = mRNA | | | | |
| | 2 (autotaxin) | /PROD = autotaxin /DB_XREF = gi: 537905 | | | | |
| | | /UG = Hs.174185 ectonucleotide | | | | |
| | | pyrophosphatasephosphodiesterase 2 | | | | |
| | | (autotaxin) /FL = gb: L35594.1 | | | | |
| 202600_s_at | nuclear receptor | Consensus includes gb: AI824012 | NRIP1 | 61.3 | −1.3 | −1.0 |
| | interacting protein 1 | /FEA = EST /DB_XREF = gi: 5444683 | | | | |
| | | /DB_XREF = est: wj29e06.x1 | | | | |
| | | /CLONE = IMAGE: 2404258 | | | | |
| | | /UG = Hs.155017 nuclear receptor | | | | |
| | | interacting protein 1 /FL = gb: NM_003489.1 | | | | |
| 202589_at | thymidylate | gb: NM_001071.1 /DEF = Homo sapiens | TYMS | 1.0 | −1.2 | −1.7 |
| | synthetase | thymidylate synthetase (TYMS), mRNA. | | | | |
| | | /FEA = mRNA /GEN = TYMS | | | | |
| | | /PROD = thymidylate synthetase | | | | |
| | | /DB_XREF = gi: 4507750 /UG = Hs.82962 | | | | |
| | | thymidylate synthetase | | | | |
| | | /FL = gb: BC002567.1 gb: NM_001071.1 | | | | |
| 221521_s_at | DNA replication | gb: BC003186.1 /DEF = Homo sapiens, | Pfs2 | −1.0 | −1.0 | −1.0 |
| | complex GINS | HSPC037 protein, clone MGC: 673, | | | | |
| | protein PSF2 | mRNA, complete cds. /FEA = mRNA | | | | |
| | | /PROD = HSPC037 protein | | | | |
| | | /DB_XREF = gi: 13112024 /UG = Hs.108196 | | | | |
| | | HSPC037 protein /FL = gb: BC003186.1 | | | | |
| | | gb: AF201939.1 | | | | |
| 201005_at | CD9 antigen (p24) | gb: NM_001769.1 /DEF = Homo sapiens | CD9 | 1.3 | 1.1 | 1.2 |
| | | CD9 antigen (p24) (CD9), mRNA. | | | | |
| | | /FEA = mRNA /GEN = CD9 /PROD = CD9 | | | | |
| | | antigen (p24) /DB_XREF = gi: 4502692 | | | | |
| | | /UG = Hs.1244 CD9 antigen (p24) | | | | |
| | | /FL = gb: M38690.1 gb: NM_001769.1 | | | | |
| | | gb: L34068.1 | | | | |
| 219148_at | T-LAK cell- | gb: NM_018492.1 /DEF = Homo sapiens | TOPK | −1.0 | −1.0 | −1.0 |
| | originated protein | PDZ-binding kinase; T-cell originated | | | | |
| | kinase | protein kinase (TOPK), mRNA. | | | | |
| | | /FEA = mRNA /GEN = TOPK /PROD = PDZ- | | | | |
| | | binding kinase /DB_XREF = gi: 8923876 | | | | |
| | | /UG = Hs.104741 PDZ-binding kinase; T- | | | | |
| | | cell originated protein kinase | | | | |
| | | /FL = gb: AF189722.1 gb: AF237709.1 | | | | |
| | | gb: NM_018492.1 gb: AB027249.1 | | | | |
| | | gb: AB027250.1 | | | | |
| 217762_s_at | RAB31, member | Consensus includes gb: BE789881 | RAB31 | 1.3 | −1.3 | −1.1 |
| | RAS oncogene | /FEA = EST /DB_XREF = gi: 10211079 | | | | |
| | family | /DB_XREF = est: 601476750F1 | | | | |
| | | /CLONE = IMAGE: 3879493 | | | | |
| | | /UG = Hs.223025 RAB31, member RAS | | | | |
| | | oncogene family /FL = gb: AF234995.1 | | | | |
| | | gb: BC001148.1 gb: U59877.1 gb: U57091.1 | | | | |
| | | gb: NM_006868.1 gb: AF183421.1 | | | | |
| 205046_at | centromere protein | gb: NM_001813.1 /DEF = Homo sapiens | CENPE | −1.0 | −1.0 | −1.0 |
| | E, 312 kDa | centromere protein E (312 kD) (CENPE), | | | | |
| | | mRNA. /FEA = mRNA /GEN = CENPE | | | | |
| | | /PROD = centromere protein E | | | | |
| | | /DB_XREF = gi: 4502780 /UG = Hs.75573 | | | | |
| | | centromere protein E (312 kD) | | | | |
| | | /FL = gb: NM_001813.1 | | | | |
| 204026_s_at | ZW10 interactor | gb: NM_007057.1 /DEF = Homo sapiens | ZWINT | 1.2 | 1.1 | −1.4 |
| | | ZW10 interactor (ZWINT), mRNA. | | | | |
| | | /FEA = mRNA /GEN = ZWINT | | | | |
| | | /PROD = ZW10 interactor | | | | |
| | | /DB_XREF = gi: 6857828 /UG = Hs.42650 | | | | |
| | | ZW10 interactor /FL = gb: AF067656.1 | | | | |
| | | gb: NM_007057.1 | | | | |
| 204834_at | fibrinogen-like 2 | gb: NM_006682.1 /DEF = Homo sapiens | FGL2 | 1.0 | −1.5 | −1.3 |
| | | fibrinogen-like 2 (FGL2), mRNA. | | | | |
| | | /FEA = mRNA /GEN = FGL2 | | | | |
| | | /PROD = fibrinogen-like 2 | | | | |
| | | /DB_XREF = gi: 5730074 /UG = Hs.2659 | | | | |
| | | fibrinogen-like 2 /FL = gb: NM_006682.1 | | | | |
| 207369_at | bombesin-like | Consensus includes gb: Z97632 | BRS3 | −66.2 | 74.8 | 1.4 |
| | receptor 3 | /DEF = Human DNA sequence from PAC | | | | |
| | | 196E23 on chromosome Xq26.1-27.2. | | | | |
| | | Contains the TAT-SF1 (HIV-1 | | | | |
| | | transcriptional elongation factor TAT | | | | |
| | | cofactor TAT-SF1) gene, the BRS3 | | | | |
| | | (Bombesin Receptor subtype-3 (Uterine | | | | |
| | | Bombesin Receptor, BRS-3) gene, an | | | | |
| | | unknown gene . . . /FEA = mRNA_2 | | | | |
| | | /DB_XREF = gi: 2808417 /UG = Hs.121484 | | | | |
| | | bombesin-like receptor 3 /FL = gb: L08893.1 | | | | |
| | | gb: NM_001727.1 | | | | |
| 204580_at | matrix | gb: NM_002426.1 /DEF = Homo sapiens | MMP12 | −56.1 | −1.0 | −50.9 |
| | metalloproteinase | matrix metalloproteinase 12 (macrophage | | | | |
| | 12 (macrophage | elastase) (MMP12), mRNA. /FEA = mRNA | | | | |
| | elastase) | /GEN = MMP12 /PROD = matrix | | | | |
| | | metalloproteinase 12 preproprotein | | | | |
| | | /DB_XREF = gi: 4505206 /UG = Hs.1695 | | | | |
| | | matrix metalloproteinase 12 (macrophage | | | | |
| | | elastase) /FL = gb: L23808.1 | | | | |
| | | gb: NM_002426.1 | | | | |
| 208892_s_at | dual specificity | gb: BC003143.1 /DEF = Homo sapiens, dual | DUSP6 | 1.3 | −1.4 | −1.2 |
| | phosphatase 6 | specificity phosphatase 6, clone | | | | |
| | | MGC: 3789, mRNA, complete cds. | | | | |
| | | /FEA = mRNA /PROD = dual specificity | | | | |
| | | phosphatase 6 /DB_XREF = gi: 13111942 | | | | |
| | | /UG = Hs.180383 dual specificity | | | | |
| | | phosphatase 6 /FL = gb: BC003562.1 | | | | |
| | | gb: BC003143.1 gb: BC005047.1 | | | | |
| | | gb: AB013382.1 gb: NM_001946.1 | | | | |
| 207850_at | chemokine (C—X—C | gb: NM_002090.1 /DEF = Homo sapiens | CXCL3 | 1.1 | 1.0 | 1.0 |
| | motif) ligand 3 | GRO3 oncogene (GRO3), mRNA. | | | | |
| | | /FEA = mRNA /GEN = GRO3 /PROD = GRO3 | | | | |
| | | oncogene /DB_XREF = gi: 4504156 | | | | |
| | | /UG = Hs.89690 GRO3 oncogene | | | | |
| | | /FL = gb: M36821.1 gb: NM_002090.1 | | | | |
| 203362_s_at | MAD2 mitotic | gb: NM_002358.2 /DEF = Homo sapiens | MAD2L1 | −1.0 | −1.0 | −1.1 |
| | arrest deficient-like | MAD2 (mitotic arrest deficient, yeast, | | | | |
| | 1 (yeast) | homolog)-like 1 (MAD2L1), mRNA. | | | | |
| | | /FEA = mRNA /GEN = MAD2L1 | | | | |
| | | /PROD = MAD2-like 1 | | | | |
| | | /DB_XREF = gi: 6466452 /UG = Hs.79078 | | | | |
| | | MAD2 (mitotic arrest deficient, yeast, | | | | |
| | | homolog)-like 1 /FL = gb: BC000356.1 | | | | |
| | | gb: U65410.1 gb: NM_002358.2 | | | | |
| | | gb: U31278.1 | | | | |
| 210146_x_at | leukocyte | gb: AF004231.1 /DEF = Homo sapiens | LILRB2 | 1.2 | −1.7 | −1.5 |
| | immunoglobulin- | monocytemacrophage Ig-related receptor | | | | |
| | like receptor, | MIR-10 (MIR cl-10) mRNA, complete cds. | | | | |
| | subfamily B (with | /FEA = mRNA /GEN = MIR cl-10 | | | | |
| | TM and ITIM | /PROD = MIR-10 /DB_XREF = gi: 2343110 | | | | |
| | domains), member 2 | /UG = Hs.22405 leukocyte immunoglobulin- | | | | |
| | | like receptor, subfamily B (with TM and | | | | |
| | | ITIM domains), member 2 | | | | |
| | | /FL = gb: AF000574.1 gb: AF004231.1 | | | | |
| | | gb: AF011565.1 | | | | |
| 215925_s_at | CD72 antigen | Consensus includes gb: AF283777.2 | CD72 | 69.7 | −1.4 | 1.4 |
| | | /DEF = Homo sapiens clone TCBAP0702 | | | | |
| | | mRNA sequence. /FEA = mRNA | | | | |
| | | /DB_XREF = gi: 10281735 /UG = Hs.116481 | | | | |
| | | CD72 antigen | | | | |
| 201200_at | cellular repressor | gb: NM_003851.1 /DEF = Homo sapiens | CREG1 | 1.4 | −1.7 | 1.0 |
| | of E1A-stimulated | cellular repressor of E1A-stimulated genes | | | | |
| | genes | (CREG), mRNA. /FEA = mRNA | | | | |
| | | /GEN = CREG /PROD = cellular repressor of | | | | |
| | | E1A-stimulated genes | | | | |
| | | /DB_XREF = gi: 4503036 /UG = Hs.5710 | | | | |
| | | cellular repressor of E1A-stimulated genes | | | | |
| | | /FL = gb: AF084523.1 gb: NM_003851.1 | | | | |
| 205393_s_at | CHK1 checkpoint | gb: NM_001274.1 /DEF = Homo sapiens | CHEK1 | −1.0 | −1.0 | −1.0 |
| | homolog (S. pombe) | CHK1 (checkpoint, S. pombe) homolog | | | | |
| | | (CHEK1), mRNA. /FEA = mRNA | | | | |
| | | /GEN = CHEK1 /PROD = CHK1 (checkpoint, | | | | |
| | | S. pombe) homolog | | | | |
| | | /DB_XREF = gi: 4502802 /UG = Hs.20295 | | | | |
| | | CHK1 (checkpoint, S. pombe) homolog | | | | |
| | | /FL = gb: AF016582.1 gb: NM_001274.1 | | | | |
| 201422_at | interferon, gamma- | gb: NM_006332.1 /DEF = Homo sapiens | IFI30 | −1.4 | 1.1 | 1.1 |
| | inducible protein | interferon, gamma-inducible protein 30 | | | | |
| | 30 | (IFI30), mRNA. /FEA = mRNA /GEN = IFI30 | | | | |
| | | /PROD = interferon, gamma-inducible | | | | |
| | | protein 30 /DB_XREF = gi: 5453695 | | | | |
| | | /UG = Hs.14623 interferon, gamma- | | | | |
| | | inducible protein 30 /FL = gb: J03909.1 | | | | |
| | | gb: NM_006332.1 gb: AF097362.1 | | | | |
| 202779_s_at | ubiquitin- | gb: NM_014501.1 /DEF = Homo sapiens | UBE2S | 1.1 | −1.5 | −1.2 |
| | conjugating | ubiquitin carrier protein (E2-EPF), mRNA. | | | | |
| | enzyme E2S | /FEA = mRNA /GEN = E2-EPF | | | | |
| | | /PROD = ubiquitin carrier protein | | | | |
| | | /DB_XREF = gi: 7657045 /UG = Hs.174070 | | | | |
| | | ubiquitin carrier protein /FL = gb: M91670.1 | | | | |
| | | gb: NM_014501.1 | | | | |
| 57540_at | ribokinase | Cluster Incl. AI823980: wj29b03.x1 Homo | RBKS | −59.7 | −1.0 | −1.0 |
| | | sapiens cDNA, 3 end /clone = IMAGE- | | | | |
| | | 2404205 /clone_end = 3′ /gb = AI823980 | | | | |
| | | /gi = 5444651 /ug = Hs.11916 /len = 620 | | | | |
| 204068_at | serine/threonine | gb: NM_006281.1 /DEF = Homo sapiens | STK3 | 51.1 | −1.0 | −1.0 |
| | kinase 3 (STE20 | serinethreonine kinase 3 (Ste20, yeast | | | | |
| | homolog, yeast) | homolog) (STK3), mRNA. /FEA = mRNA | | | | |
| | | /GEN = STK3 /PROD = serinethreonine | | | | |
| | | kinase 3 (Ste20, yeasthomolog) | | | | |
| | | /DB_XREF = gi: 5454093 /UG = Hs.166684 | | | | |
| | | serinethreonine kinase 3 (Ste20, yeast | | | | |
| | | homolog) /FL = gb: U26424.1 gb: U60206.1 | | | | |
| | | gb: NM_006281.1 | | | | |
| 218559_s_at | v-maf | gb: NM_005461.1 /DEF = Homo sapiens | MAFB | 1.1 | −1.5 | 1.1 |
| | musculoaponeurotic | Kreisler (mouse) maf-related leucine | | | | |
| | fibrosarcoma | zipper homolog (KRML), mRNA. | | | | |
| | oncogene homolog | /FEA = mRNA /GEN = KRML | | | | |
| | B (avian) | /PROD = Kreisler (mouse) maf-related | | | | |
| | | leucine zipperhomolog | | | | |
| | | /DB_XREF = gi: 4885446 /UG = Hs.169487 | | | | |
| | | Kreisler (mouse) maf-related leucine | | | | |
| | | zipper homolog /FL = gb: AF134157.1 | | | | |
| | | gb: NM_005461.1 | | | | |
| 208107_s_at | exonuclease NEF- | gb: NM_030941.1 /DEF = Homo sapiens | | −1.0 | −1.0 | −1.0 |
| | sp | exonuclease NEF-sp (LOC81691), mRNA. | | | | |
| | | /FEA = mRNA /GEN = LOC81691 | | | | |
| | | /PROD = exonuclease NEF-sp | | | | |
| | | /DB_XREF = gi: 13569912 | | | | |
| | | /FL = gb: NM_030941.1 | | | | |
| 210512_s_at | vascular | gb: AF022375.1 /DEF = Homo sapiens | VEGF | 80.6 | −73.5 | −1.2 |
| | endothelial growth | vascular endothelial growth factor mRNA, | | | | |
| | factor | complete cds. /FEA = mRNA | | | | |
| | | /PROD = vascular endothelial growth factor | | | | |
| | | /DB_XREF = gi: 3719220 /UG = Hs.73793 | | | | |
| | | vascular endothelial growth factor | | | | |
| | | /FL = gb: M32977.1 gb: AF022375.1 | | | | |
| | | gb: NM_003376.1 gb: AB021221.1 | | | | |
| | | gb: AF091352.1 | | | | |
| 200783_s_at | stathmin | gb: NM_005563.2 /DEF = Homo sapiens | STMN1 | −1.2 | 1.6 | 1.1 |
| | 1/oncoprotein 18 | leukemia-associated phosphoprotein p18 | | | | |
| | | (stathmin) (LAP18), mRNA. /FEA = mRNA | | | | |
| | | /GEN = LAP18 /PROD = leukemia- | | | | |
| | | associated phosphoprotein p18 | | | | |
| | | /DB_XREF = gi: 13518023 /UG = Hs.81915 | | | | |
| | | leukemia-associated phosphoprotein p18 | | | | |
| | | (stathmin) /FL = gb: NM_005563.2 | | | | |
| | | gb: J04991.1 | | | | |
| 202107_s_at | MCM2 | gb: NM_004526.1 /DEF = Homo sapiens | MCM2 | 1.1 | −1.5 | −1.5 |
| | minichromosome | minichromosome maintenance deficient | | | | |
| | maintenance | (S. cerevisiae) 2 (mitotin) (MCM2), mRNA. | | | | |
| | deficient 2, mitotin | /FEA = mRNA /GEN = MCM2 | | | | |
| | (S. cerevisiae) | /PROD = minichromosome maintenance | | | | |
| | | deficient (S. cerevisiae) 2 (mitotin) | | | | |
| | | /DB_XREF = gi: 4758705 /UG = Hs.57101 | | | | |
| | | minichromosome maintenance deficient | | | | |
| | | (S. cerevisiae) 2 (mitotin) | | | | |
| | | /FL = gb: D83987.1 gb: NM_004526.1 | | | | |
| 213566_at | ribonuclease, | Consensus includes gb: NM_005615.1 | RNASE6 | 1.2 | −1.2 | 1.7 |
| | RNase A family, k6 | /DEF = Homo sapiens ribonuclease, RNase | | | | |
| | | A family, k6 (RNASE6), mRNA. | | | | |
| | | /FEA = CDS /GEN = RNASE6 | | | | |
| | | /PROD = ribonuclease, RNase A family, k6 | | | | |
| | | /DB_XREF = gi: 5032044 /UG = Hs.23262 | | | | |
| | | ribonuclease, RNase A family, k6 | | | | |
| | | /FL = gb: NM_005615.1 | | | | |
| 205240_at | G-protein signalling | gb: NM_013296.1 /DEF = Homo sapiens | GPSM2 | −1.0 | −1.0 | −1.0 |
| | modulator 2 (AGS3 | LGN protein (HSU54999), mRNA. | | | | |
| | like, C. elegans) | /FEA = mRNA /GEN = HSU54999 | | | | |
| | | /PROD = LGN protein | | | | |
| | | /DB_XREF = gi: 9558734 /UG = Hs.278338 | | | | |
| | | LGN protein /FL = gb: U54999.1 | | | | |
| | | gb: NM_013296.1 | | | | |
| 208498_s_at | amylase, alpha 2B; | gb: NM_004038.1 /DEF = Homo sapiens | AMY2B | 2.0 | −1.3 | 1.1 |
| | pancreatic | amylase, alpha 1A; salivary (AMY1A), | | | | |
| | | mRNA. /FEA = CDS /GEN = AMY1A | | | | |
| | | /PROD = amylase, alpha 1A; salivary | | | | |
| | | /DB_XREF = gi: 4757749 /UG = Hs.274376 | | | | |
| | | amylase, alpha 1A; salivary | | | | |
| | | /FL = gb: NM_004038.1 | | | | |
| 202241_at | tribbles homolog 1 | gb: NM_025195.1 /DEF = Homo sapiens | TRIB1 | 1.4 | −1.3 | 1.1 |
| | (Drosophila) | phosphoprotein regulated by mitogenic | | | | |
| | | pathways (C8FW), mRNA. /FEA = mRNA | | | | |
| | | /GEN = C8FW /PROD = G-protein-coupled | | | | |
| | | receptor induced protein | | | | |
| | | /DB_XREF = gi: 13399327 /UG = Hs.7837 | | | | |
| | | phosphoprotein regulated by mitogenic | | | | |
| | | pathways /FL = gb: AF205437.1 | | | | |
| | | gb: NM_025195.1 | | | | |
| 219947_at | C-type (calcium | gb: NM_016184.1 /DEF = Homo sapiens C- | CLECSF6 | 1.5 | −1.2 | −1.8 |
| | dependent, | type (calcium dependent, carbohydrate- | | | | |
| | carbohydrate- | recognition domain) lectin, superfamily | | | | |
| | recognition | member 6 (CLECSF6), mRNA. | | | | |
| | domain) lectin, | /FEA = mRNA /GEN = CLECSF6 /PROD = C- | | | | |
| | superfamily | type (calcium dependent, carbohydrate- | | | | |
| | member 6 | recognition domain) lectin, | | | | |
| | | superfamilymember 6 | | | | |
| | | /DB_XREF = gi: 7705337 /UG = Hs.115515 C- | | | | |
| | | type (calcium dependent, carbohydrate- | | | | |
| | | recognition domain) lectin, superfamily | | | | |
| | | member 6 /FL = gb: AF109146.1 | | | | |
| | | gb: NM_016184.1 gb: AF067800.1 | | | | |
| 204787_at | Ig superfamily | gb: NM_007268.1 /DEF = Homo sapiens Ig | VSIG4 | 1.1 | 1.0 | 1.2 |
| | protein | superfamily protein (Z39IG), mRNA. | | | | |
| | | /FEA = mRNA /GEN = Z39IG /PROD = Ig | | | | |
| | | superfamily protein | | | | |
| | | /DB_XREF = gi: 6005957 /UG = Hs.8904 Ig | | | | |
| | | superfamily protein /FL = gb: NM_007268.1 | | | | |
| 204860_s_at | baculoviral IAP | Consensus includes gb: AI817801 | BIRC1 | 1.2 | 1.0 | 1.1 |
| | repeat-containing 1 | /FEA = EST /DB_XREF = gi: 5436880 | | | | |
| | | /DB_XREF = est: wk40d12.x1 | | | | |
| | | /CLONE = IMAGE: 2417879 /UG = Hs.79019 | | | | |
| | | baculoviral IAP repeat-containing 1 | | | | |
| | | /FL = gb: U19251.1 gb: NM_004536.1 | | | | |
| 205547_s_at | transgelin | gb: NM_003186.2 /DEF = Homo sapiens | TAGLN | 1.4 | 1.0 | 1.1 |
| | | transgelin (TAGLN), mRNA. /FEA = mRNA | | | | |
| | | /GEN = TAGLN /PROD = transgelin | | | | |
| | | /DB_XREF = gi: 12621918 /UG = Hs.75777 | | | | |
| | | transgelin /FL = gb: NM_003186.2 | | | | |
| | | gb: M95787.1 gb: D17409.1 | | | | |
| 218755_at | kinesin family | gb: NM_005733.1 /DEF = Homo sapiens | KIF20A | −1.0 | −1.0 | −1.0 |
| | member 20A | RAB6 interacting, kinesin-like | | | | |
| | | (rabkinesin6) (RAB6KIFL), mRNA. | | | | |
| | | /FEA = mRNA /GEN = RAB6KIFL | | | | |
| | | /PROD = RAB6 interacting, kinesin-like | | | | |
| | | (rabkinesin6) /DB_XREF = gi: 5032012 | | | | |
| | | /UG = Hs.73625 RAB6 interacting, kinesin- | | | | |
| | | like (rabkinesin6) /FL = gb: AF070672.1 | | | | |
| | | gb: AF153329.1 gb: NM_005733.1 | | | | |
| 207906_at | interleukin 3 | gb: NM_000588.1 /DEF = Homo sapiens | IL3 | −1.0 | −1.0 | −1.0 |
| | (colony-stimulating | interleukin 3 (colony-stimulating factor, | | | | |
| | factor, multiple) | multiple) (IL3), mRNA. /FEA = mRNA | | | | |
| | | /GEN = IL3 /PROD = interleukin 3 (colony- | | | | |
| | | stimulating factor, multiple) | | | | |
| | | /DB_XREF = gi: 4504666 /UG = Hs.694 | | | | |
| | | interleukin 3 (colony-stimulating factor, | | | | |
| | | multiple) /FL = gb: M17115.1 gb: M14743.1 | | | | |
| | | gb: M20137.1 gb: NM_000588.1 | | | | |
| 210004_at | oxidised low | gb: AF035776.1 /DEF = Homo sapiens | OLR1 | 1.2 | −1.6 | −2.0 |
| | density lipoprotein | oxidized low-density lipoprotein receptor | | | | |
| | (lectin-like) | mRNA, complete cds. /FEA = mRNA | | | | |
| | receptor 1 | /PROD = oxidized low-density lipoprotein | | | | |
| | | receptor /DB_XREF = gi: 3941299 | | | | |
| | | /UG = Hs.77729 oxidised low density | | | | |
| | | lipoprotein (lectin-like) receptor 1 | | | | |
| | | /FL = gb: AB010710.1 gb: AF035776.1 | | | | |
| | | gb: NM_002543.1 | | | | |
| 221419_s_at | Similar to | gb: NM_013307.1 /DEF = Homo sapiens | | −1.5 | 1.0 | −1.1 |
| | ribosomal protein | non-functional folate binding protein | | | | |
| | L13a; 60S | (HSAF000381), mRNA. /FEA = CDS | | | | |
| | ribosomal protein | /GEN = HSAF000381 /PROD = non- | | | | |
| | L13a; 23 kD highly | functional folate binding protein | | | | |
| | basic protein | /DB_XREF = gi: 7019412 | | | | |
| | (LOC399810), | /FL = gb: NM_013307.1 | | | | |
| | mRNA [BLAST] | | | | | |
| 218436_at | endoplasmic | gb: NM_022464.1 /DEF = Homo sapiens | SIL1 | 115.9 | −1.8 | −1.7 |
| | reticulum | endoplasmic reticulum chaperone SIL1, | | | | |
| | chaperone SIL1, | homolog of yeast (SIL1), mRNA. | | | | |
| | homolog of yeast | /FEA = mRNA /GEN = SIL1 | | | | |
| | | /PROD = endoplasmic reticulum chaperone | | | | |
| | | SIL1, homolog ofyeast | | | | |
| | | /DB_XREF = gi: 11968008 /UG = Hs.297875 | | | | |
| | | endoplasmic reticulum chaperone SIL1, | | | | |
| | | homolog of yeast /FL = gb: NM_022464.1 | | | | |
| 205727_at | telomerase- | gb: NM_007110.1 /DEF = Homo sapiens | TEP1 | −1.0 | −1.0 | −1.0 |
| | associated protein 1 | telomerase-associated protein 1 (TEP1), | | | | |
| | | mRNA. /FEA = mRNA /GEN = TEP1 | | | | |
| | | /PROD = telomerase-associated protein 1 | | | | |
| | | /DB_XREF = gi: 6005893 /UG = Hs.232070 | | | | |
| | | telomerase-associated protein 1 | | | | |
| | | /FL = gb: U86136.1 gb: NM_007110.1 | | | | |
| 218831_s_at | Fc fragment of IgG, | gb: NM_004107.1 /DEF = Homo sapiens Fc | FCGRT | −1.2 | −1.2 | 1.0 |
| | receptor, | fragment of IgG, receptor, transporter, | | | | |
| | transporter, alpha | alpha (FCGRT), mRNA. /FEA = mRNA | | | | |
| | | /GEN = FCGRT /PROD = Fc fragment of | | | | |
| | | IgG, receptor, transporter, alpha | | | | |
| | | /DB_XREF = gi: 4758345 /UG = Hs.111903 | | | | |
| | | Fc fragment of IgG, receptor, transporter, | | | | |
| | | alpha /FL = gb: NM_004107.1 gb: U12255.1 | | | | |
| 217963_s_at | nerve growth factor | gb: NM_014380.1 /DEF = Homo sapiens | NGFRAP1 | 1.2 | 1.0 | 1.3 |
| | receptor | p75NTR-associated cell death executor; | | | | |
| | (TNFRSF16) | ovarian granulosa cell protein (13 kD) | | | | |
| | associated protein 1 | (DXS6984E), mRNA. /FEA = mRNA | | | | |
| | | /GEN = DXS6984E /PROD = p75NTR- | | | | |
| | | associated cell death executor; | | | | |
| | | ovariangranulosa cell protein (13 kD) | | | | |
| | | /DB_XREF = gi: 7657043 /UG = Hs.17775 | | | | |
| | | p75NTR-associated cell death executor; | | | | |
| | | ovarian granulosa cell protein (13 kD) | | | | |
| | | /FL = gb: NM_014380.1 gb: AF187064.1 | | | | |
| 209642_at | BUB1 budding | gb: AF043294.2 /DEF = Homo sapiens | BUB1 | −1.0 | −50.6 | −52.7 |
| | uninhibited by | putative mitotic checkpoint kinase mRNA, | | | | |
| | benzimidazoles 1 | complete cds. /FEA = mRNA | | | | |
| | homolog (yeast) | /PROD = putative mitotic checkpoint kinase | | | | |
| | | /DB_XREF = gi: 6970210 /UG = Hs.98658 | | | | |
| | | budding uninhibited by benzimidazoles 1 | | | | |
| | | (yeast homolog) /FL = gb: AF047471.1 | | | | |
| | | gb: AF053305.1 gb: AF046078.1 | | | | |
| | | gb: NM_004336.1 gb: AF043294.2 | | | | |
| 203418_at | cyclin A2 | gb: NM_001237.1 /DEF = Homo sapiens | CCNA2 | −1.0 | −1.0 | −72.9 |
| | | cyclin A2 (CCNA2), mRNA. /FEA = mRNA | | | | |
| | | /GEN = CCNA2 /PROD = cyclin A | | | | |
| | | /DB_XREF = gi: 4502612 /UG = Hs.85137 | | | | |
| | | cyclin A2 /FL = gb: NM_001237.1 | | | | |
| 203755_at | BUB1 budding | gb: NM_001211.2 /DEF = Homo sapiens | BUB1B | 1.1 | −1.3 | −1.1 |
| | uninhibited by | budding uninhibited by benzimidazoles 1 | | | | |
| | benzimidazoles 1 | (yeast homolog), beta (BUB1B), mRNA. | | | | |
| | homolog beta | /FEA = mRNA /GEN = BUB1B | | | | |
| | (yeast) | /PROD = budding uninhibited by | | | | |
| | | benzimidazoles 1 (yeasthomolog), beta | | | | |
| | | /DB_XREF = gi: 5729749 /UG = Hs.36708 | | | | |
| | | budding uninhibited by benzimidazoles 1 | | | | |
| | | (yeast homolog), beta /FL = gb: AF053306.1 | | | | |
| | | gb: AF035933.1 gb: AF068760.1 | | | | |
| | | gb: AF046918.1 gb: AF107297.1 | | | | |
| | | gb: AF046079.2 gb: NM_001211.2 | | | | |
| 205582_s_at | gamma- | gb: NM_004121.1 /DEF = Homo sapiens | GGTLA1 | −1.0 | −1.0 | −55.9 |
| | glutamyltransferase- | gamma-glutamyltransferase-like activity 1 | | | | |
| | like activity 1 | (GGTLA1), mRNA. /FEA = mRNA | | | | |
| | | /GEN = GGTLA1 /PROD = gamma- | | | | |
| | | glutamyltransferase-like activity 1 | | | | |
| | | /DB_XREF = gi: 4758431 /UG = Hs.1675 | | | | |
| | | gamma-glutamyltransferase-like activity 1 | | | | |
| | | /FL = gb: M64099.1 gb: NM_004121.1 | | | | |
| 206420_at | immunoglobulin | gb: NM_005849.1 /DEF = Homo sapiens | IGSF6 | −1.2 | −1.4 | −1.3 |
| | superfamily, | immunoglobulin superfamily, member 6 | | | | |
| | member 6 | (IGSF6), mRNA. /FEA = mRNA | | | | |
| | | /GEN = IGSF6 /PROD = immunoglobulin | | | | |
| | | superfamily, member 6 | | | | |
| | | /DB_XREF = gi: 5031672 /UG = Hs.135194 | | | | |
| | | immunoglobulin superfamily, member 6 | | | | |
| | | /FL = gb: NM_005849.1 | | | | |
| 204072_s_at | hypothetical | gb: NM_023037.1 /DEF = Homo sapiens | 13CDNA73 | 1.3 | 1.2 | −1.5 |
| | protein CG003 | putative gene product (13CDNA73), | | | | |
| | | mRNA. /FEA = mRNA /GEN = 13CDNA73 | | | | |
| | | /PROD = putative gene product | | | | |
| | | /DB_XREF = gi: 12957487 /UG = Hs.181304 | | | | |
| | | putative gene product | | | | |
| | | /FL = gb: NM_023037.1 | | | | |
| 201798_s_at | fer-1-like 3, | gb: NM_013451.1 /DEF = Homo sapiens fer- | FER1L3 | −1.3 | −1.7 | −2.0 |
| | myoferlin (C. elegans) | 1 (C. elegans)-like 3 (myoferlin) (FER1L3), | | | | |
| | | mRNA. /FEA = mRNA /GEN = FER1L3 | | | | |
| | | /PROD = fer-1 (C. elegans)-like 3 (myoferlin) | | | | |
| | | /DB_XREF = gi: 7305052 /UG = Hs.234680 | | | | |
| | | fer-1 (C. elegans)-like 3 (myoferlin) | | | | |
| | | /FL = gb: AF182316.1 gb: NM_013451.1 | | | | |
| 203213_at | cell division cycle | Consensus includes gb: AL524035 | CDC2 | −1.0 | −1.0 | −1.0 |
| | 2, G1 to S and G2 | /FEA = EST /DB_XREF = gi: 12787528 | | | | |
| | to M | /DB_XREF = est: AL524035 | | | | |
| | | /CLONE = CS0DC003YN06 (3 prime) | | | | |
| | | /UG = Hs.184572 cell division cycle 2, G1 | | | | |
| | | to S and G2 to M /FL = gb: NM_001786.1 | | | | |
| 212681_at | erythrocyte | Consensus includes gb: AI770004 | EPB41L3 | 1.6 | 1.1 | −1.1 |
| | membrane protein | /FEA = EST /DB_XREF = gi: 5236513 | | | | |
| | band 4.1-like 3 | /DB_XREF = est: wh66d06.x1 | | | | |
| | | /CLONE = IMAGE: 2385707 | | | | |
| | | /UG = Hs.103839 erythrocyte membrane | | | | |
| | | protein band 4.1-like 3 | | | | |
| 205167_s_at | cell division cycle | gb: NM_001790.2 /DEF = Homo sapiens cell | CDC25C | −1.0 | −1.0 | −1.0 |
| | 25C | division cycle 25C (CDC25C), transcript | | | | |
| | | variant 1, mRNA. /FEA = mRNA | | | | |
| | | /GEN = CDC25C /PROD = cell division cycle | | | | |
| | | 25C protein, isoform a | | | | |
| | | /DB_XREF = gi: 12408659 /UG = Hs.656 cell | | | | |
| | | division cycle 25C /FL = gb: NM_001790.2 | | | | |
| | | gb: M34065.1 | | | | |
| 204033_at | thyroid hormone | gb: NM_004237.1 /DEF = Homo sapiens | TRIP13 | −67.9 | 1.3 | 1.0 |
| | receptor interactor | thyroid hormone receptor interactor 13 | | | | |
| | 13 | (TRIP13), mRNA. /FEA = mRNA | | | | |
| | | /GEN = TRIP13 /PROD = thyroid hormone | | | | |
| | | receptor interactor 13 | | | | |
| | | /DB_XREF = gi: 11321606 /UG = Hs.6566 | | | | |
| | | thyroid hormone receptor interactor 13 | | | | |
| | | /FL = gb: NM_004237.1 gb: BC000404.1 | | | | |
| | | gb: U96131.1 | | | | |
| 201110_s_at | thrombospondin 1 | gb: NM_003246.1 /DEF = Homo sapiens | THBS1 | 1.9 | 86.1 | 61.4 |
| | | thrombospondin 1 (THBS1), mRNA. | | | | |
| | | /FEA = mRNA /GEN = THBS1 | | | | |
| | | /PROD = thrombospondin 1 | | | | |
| | | /DB_XREF = gi: 4507484 /UG = Hs.87409 | | | | |
| | | thrombospondin 1 /FL = gb: NM_003246.1 | | | | |
| 210052_s_at | TPX2, microtubule- | gb: AF098158.1 /DEF = Homo sapiens | TPX2 | −61.8 | −73.1 | −83.2 |
| | associated protein | restricted expressed proliferation | | | | |
| | homolog (Xenopus | associated protein 100 mRNA, complete | | | | |
| | laevis) | cds. /FEA = mRNA /PROD = restricted | | | | |
| | | expressed proliferation associatedprotein | | | | |
| | | 100 /DB_XREF = gi: 6073830 /UG = Hs.9329 | | | | |
| | | chromosome 20 open reading frame 1 | | | | |
| | | /FL = gb: NM_012112.1 gb: BC004136.1 | | | | |
| | | gb: AB024704.1 gb: AF146731.1 | | | | |
| | | gb: AF098158.1 gb: AB027467.1 | | | | |
| 202870_s_at | CDC20 cell | gb: NM_001255.1 /DEF = Homo sapiens | CDC20 | −1.0 | −1.0 | −63.0 |
| | division cycle 20 | CDC20 (cell division cycle 20, S. cerevisiae, | | | | |
| | homolog (S. cerevisiae) | homolog) (CDC20), mRNA. | | | | |
| | | /FEA = mRNA /GEN = CDC20 /PROD = cell | | | | |
| | | division cycle 20 /DB_XREF = gi: 4557436 | | | | |
| | | /UG = Hs.82906 CDC20 (cell division cycle | | | | |
| | | 20, S. cerevisiae, homolog) | | | | |
| | | /FL = gb: BC001088.1 gb: AF099644.1 | | | | |
| | | gb: NM_001255.1 gb: U05340.1 | | | | |
| 203005_at | lymphotoxin beta | gb: NM_002342.1 /DEF = Homo sapiens | LTBR | 1.2 | 1.5 | 1.2 |
| | receptor (TNFR | lymphotoxin beta receptor (TNFR | | | | |
| | superfamily, | superfamily, member 3 (LTBR), mRNA. | | | | |
| | member 3) | /FEA = mRNA /GEN = LTBR | | | | |
| | | /PROD = lymphotoxin B receptor | | | | |
| | | /DB_XREF = gi: 4505038 /UG = Hs.1116 | | | | |
| | | lymphotoxin beta receptor (TNFR | | | | |
| | | superfamily, member 3 /FL = gb: L04270.1 | | | | |
| | | gb: NM_002342.1 | | | | |
| 219607_s_at | membrane- | gb: NM_024021.1 /DEF = Homo sapiens | MS4A4A | −1.0 | 1.0 | 2.0 |
| | spanning 4- | membrane-spanning 4-domains, subfamily | | | | |
| | domains subfamily | A, member 4 (MS4A4), mRNA. | | | | |
| | A, member 4 | /FEA = mRNA /GEN = MS4A4 | | | | |
| | | /PROD = membrane-spanning 4-domains, | | | | |
| | | subfamily A, member4 | | | | |
| | | /DB_XREF = gi: 13430865 /UG = Hs.325960 | | | | |
| | | membrane-spanning 4-domains, subfamily | | | | |
| | | A, member 4 /FL = gb: AB013102.1 | | | | |
| | | gb: NM_024021.1 gb: AF068288.1 | | | | |
| | | gb: NM_016650.1 | | | | |
| 204887_s_at | polo-like kinase 4 | gb: NM_014264.1 /DEF = Homo sapiens | PLK4 | −1.0 | −1.0 | −1.2 |
| | (Drosophila) | serinethreonine kinase 18 (STK18), | | | | |
| | | mRNA. /FEA = mRNA /GEN = STK18 | | | | |
| | | /PROD = serinethreonine kinase 18 | | | | |
| | | /DB_XREF = gi: 7657626 /UG = Hs.172052 | | | | |
| | | serinethreonine kinase 18 | | | | |
| | | /FL = gb: NM_014264.1 | | | | |
| 204159_at | cyclin-dependent | gb: NM_001262.1 /DEF = Homo sapiens | CDKN2C | −1.0 | −1.0 | 52.9 |
| | kinase inhibitor 2C | cyclin-dependent kinase inhibitor 2C (p18, | | | | |
| | (p18, inhibits | inhibits CDK4) (CDKN2C), mRNA. | | | | |
| | CDK4) | /FEA = mRNA /GEN = CDKN2C | | | | |
| | | /PROD = cyclin-dependent kinase inhibitor | | | | |
| | | 2C (p18, inhibits CDK4) | | | | |
| | | /DB_XREF = gi: 4502750 /UG = Hs.4854 | | | | |
| | | cyclin-dependent kinase inhibitor 2C (p18, | | | | |
| | | inhibits CDK4) /FL = gb: AF041248.1 | | | | |
| | | gb: NM_001262.1 | | | | |
| 220832_at | toll-like receptor 8 | gb: NM_016610.1 /DEF = Homo sapiens | TLR8 | 1.4 | −2.0 | −95.0 |
| | | Toll-like receptor 8 (LOC51311), mRNA. | | | | |
| | | /FEA = mRNA /GEN = LOC51311 | | | | |
| | | /PROD = Toll-like receptor 8 | | | | |
| | | /DB_XREF = gi: 7706147 /UG = Hs.272410 | | | | |
| | | Toll-like receptor 8 /FL = gb: AF246971.1 | | | | |
| | | gb: NM_016610.1 gb: AF245703.1 | | | | |
| 204112_s_at | histamine N- | gb: NM_006895.1 /DEF = Homo sapiens | HNMT | 1.1 | −1.2 | 1.1 |
| | methyltransferase | histamine N-methyltransferase (HNMT), | | | | |
| | | mRNA. /FEA = mRNA /GEN = HNMT | | | | |
| | | /PROD = histamine N-methyltransferase | | | | |
| | | /DB_XREF = gi: 5901969 /UG = Hs.81182 | | | | |
| | | histamine N-methyltransferase | | | | |
| | | /FL = gb: U08092.1 gb: D16224.1 | | | | |
| | | gb: NM_006895.1 | | | | |
| 206148_at | interleukin 3 | gb: NM_002183.1 /DEF = Homo sapiens | IL3RA | −1.0 | −1.0 | −1.0 |
| | receptor, alpha | interleukin 3 receptor, alpha (low affinity) | | | | |
| | (low affinity) | (IL3RA), mRNA. /FEA = mRNA | | | | |
| | | /GEN = IL3RA /PROD = interleukin 3 | | | | |
| | | receptor, alpha (low affinity) | | | | |
| | | /DB_XREF = gi: 13324709 /UG = Hs.172689 | | | | |
| | | interleukin 3 receptor, alpha (low affinity) | | | | |
| | | /FL = gb: NM_002183.1 gb: M74782.1 | | | | |
| 202087_s_at | cathepsin L | gb: NM_001912.1 /DEF = Homo sapiens | CTSL | 1.2 | −1.5 | 1.4 |
| | | cathepsin L (CTSL), mRNA. /FEA = mRNA | | | | |
| | | /GEN = CTSL /PROD = cathepsin L | | | | |
| | | /DB_XREF = gi: 4503154 /UG = Hs.78056 | | | | |
| | | cathepsin L /FL = gb: NM_001912.1 | | | | |
| 218308_at | transforming, | gb: NM_006342.1 /DEF = Homo sapiens | TACC3 | 1.1 | −1.1 | 1.0 |
| | acidic coiled-coil | transforming, acidic coiled-coil containing | | | | |
| | containing protein 3 | protein 3 (TACC3), mRNA. /FEA = mRNA | | | | |
| | | /GEN = TACC3 /PROD = transforming acidic | | | | |
| | | coiled-coil containingprotein 3 | | | | |
| | | /DB_XREF = gi: 5454101 /UG = Hs.104019 | | | | |
| | | transforming, acidic coiled-coil containing | | | | |
| | | protein 3 /FL = gb: AF093543.1 | | | | |
| | | gb: NM_006342.1 | | | | |
| 208322_s_at | sialyltransferase | gb: NM_003033.1 /DEF = Homo sapiens | SIAT4A | 1.1 | −1.2 | 1.2 |
| | 4A (beta- | sialyltransferase 4A (beta-galactosidase | | | | |
| | galactoside alpha- | alpha-2,3-sialytransferase) (SIAT4A), | | | | |
| | 2,3- | mRNA. /FEA = mRNA /GEN = SIAT4A | | | | |
| | sialyltransferase) | /PROD = sialyltransferase 4A (beta- | | | | |
| | | galactosidasealpha-2,3-sialytransferase) | | | | |
| | | /DB_XREF = gi: 4506950 /UG = Hs.301698 | | | | |
| | | sialyltransferase 4A (beta-galactosidase | | | | |
| | | alpha-2,3-sialytransferase) | | | | |
| | | /FL = gb: L13972.1 gb: NM_003033.1 | | | | |
| | | gb: L29555.1 | | | | |
| 213226_at | exosome | Consensus includes gb: AI346350 | CCNA2 | −1.3 | −1.4 | −69.4 |
| | component 9 | /FEA = EST /DB_XREF = gi: 4083556 | | | | |
| | | /DB_XREF = est: qp50c06.x1 | | | | |
| | | /CLONE = IMAGE: 1926442 /UG = Hs.91728 | | | | |
| | | polymyositisscleroderma autoantigen 1 | | | | |
| | | (75 kD) | | | | |
| 205345_at | BRCA1 associated | gb: NM_000465.1 /DEF = Homo sapiens | BARD1 | 79.0 | −1.3 | −1.2 |
| | RING domain 1 | BRCA1 associated RING domain 1 | | | | |
| | | (BARD1), mRNA. /FEA = mRNA | | | | |
| | | /GEN = BARD1 /PROD = BRCA1 associated | | | | |
| | | RING domain 1 /DB_XREF = gi: 4557348 | | | | |
| | | /UG = Hs.54089 BRCA1 associated RING | | | | |
| | | domain 1 /FL = gb: U76638.1 | | | | |
| | | gb: NM_000465.1 | | | | |
| 203485_at | reticulon 1 | gb: NM_021136.1 /DEF = Homo sapiens | RTN1 | 1.3 | −1.3 | −1.7 |
| | | reticulon 1 (RTN1), mRNA. /FEA = mRNA | | | | |
| | | /GEN = RTN1 /PROD = reticulon 1 | | | | |
| | | /DB_XREF = gi: 10863934 /UG = Hs.99947 | | | | |
| | | reticulon 1 /FL = gb: NM_021136.1 | | | | |
| | | gb: L10333.1 gb: L10334.1 | | | | |
| 211336_x_at | leukocyte | gb: AF009007.1 /DEF = Homo sapiens | LILRB1 | −1.1 | −1.2 | 1.0 |
| | immunoglobulin- | immunoglobulin-like transcript 2c mRNA, | | | | |
| | like receptor, | complete cds. /FEA = mRNA | | | | |
| | subfamily B (with | /PROD = immunoglobulin-like transcript 2c | | | | |
| | TM and ITIM | /DB_XREF = gi: 2660705 /UG = Hs.204040 | | | | |
| | domains), member 1 | leukocyte immunoglobulin-like receptor, | | | | |
| | | subfamily B (with TM and ITIM domains), | | | | |
| | | member 1 /FL = gb: AF009007.1 | | | | |
| 206978_at | Transcribed | gb: NM_000647.2 /DEF = Homo sapiens | CCR2 | 1.2 | −1.4 | −1.6 |
| | sequences | chemokine (C-C motif) receptor 2 (CCR2), | | | | |
| | | mRNA. /FEA = mRNA /GEN = CCR2 | | | | |
| | | /PROD = chemokine (C-C motif) receptor 2 | | | | |
| | | /DB_XREF = gi: 4827072 /UG = Hs.395 | | | | |
| | | chemokine (C-C motif) receptor 2 | | | | |
| | | /FL = gb: U03882.1 gb: NM_000647.2 | | | | |
| 200853_at | H2A histone family, | gb: NM_002106.1 /DEF = Homo sapiens | | 1.3 | −1.3 | −1.3 |
| | member Z | H2A histone family, member Z (H2AFZ), | | | | |
| | | mRNA. /FEA = mRNA /GEN = H2AFZ | | | | |
| | | /PROD = H2A histone family, member Z | | | | |
| | | /DB_XREF = gi: 4504254 /UG = Hs.119192 | | | | |
| | | H2A histone family, member Z | | | | |
| | | /FL = gb: M37583.1 gb: NM_002106.1 | | | | |
| 204558_at | RAD54-like (S. cerevisiae) | gb: NM_003579.1 /DEF = Homo sapiens | RAD54L | −1.0 | −1.0 | −1.0 |
| | | RAD54 (S. cerevisiae)-like (RAD54L), | | | | |
| | | mRNA. /FEA = mRNA /GEN = RAD54L | | | | |
| | | /PROD = RAD54 (S. cerevisiae)-like | | | | |
| | | /DB_XREF = gi: 4506396 /UG = Hs.66718 | | | | |
| | | RAD54 (S. cerevisiae)-like | | | | |
| | | /FL = gb: NM_003579.1 | | | | |
| 218662_s_at | chromosome | gb: NM_022346.1 /DEF = Homo sapiens | HCAP-G | −1.0 | −1.0 | −51.5 |
| | condensation | chromosome condensation protein G | | | | |
| | protein G | (HCAP-G), mRNA. /FEA = mRNA | | | | |
| | | /GEN = HCAP-G /PROD = chromosome | | | | |
| | | condensation protein G | | | | |
| | | /DB_XREF = gi: 11641252 /UG = Hs.193602 | | | | |
| | | chromosome condensation protein G | | | | |
| | | /FL = gb: AF235023.1 gb: NM_022346.1 | | | | |
| | | gb: AF331796.1 gb: BC000827.1 | | | | |
| | | gb: AB013299.1 | | | | |
| 209531_at | glutathione | gb: BC001453.1 /DEF = Homo sapiens, | GSTZ1 | −109.4 | −1.2 | 1.1 |
| | transferase zeta 1 | glutathione transferase zeta 1 | | | | |
| | (maleylacetoacetate | (maleylacetoacetate isomerase), clone | | | | |
| | isomerase) | MGC: 2029, mRNA, complete cds. | | | | |
| | | /FEA = mRNA /PROD = glutathione | | | | |
| | | transferase zeta 1(maleylacetoacetate | | | | |
| | | isomerase) /DB_XREF = gi: 12655190 | | | | |
| | | /UG = Hs.26403 glutathione transferase | | | | |
| | | zeta 1 (maleylacetoacetate isomerase) | | | | |
| | | /FL = gb: BC001453.1 gb: U86529.1 | | | | |
| | | gb: NM_001513.1 | | | | |
| 211519_s_at | kinesin family | gb: AY026505.1 /DEF = Homo sapiens | KIF2C | −1.4 | −1.1 | 1.1 |
| | member 2C | testis specific mitotic centromere- | | | | |
| | | associated kinesin mRNA, complete cds. | | | | |
| | | /FEA = mRNA /PROD = testis specific mitotic | | | | |
| | | centromere-associatedkinesin | | | | |
| | | /DB_XREF = gi: 13432054 /UG = Hs.69360 | | | | |
| | | kinesin-like 6 (mitotic centromere- | | | | |
| | | associated kinesin) /FL = gb: AY026505.1 | | | | |
| 202954_at | ubiquitin- | gb: NM_007019.1 /DEF = Homo sapiens | UBE2C | 1.1 | 1.0 | −1.1 |
| | conjugating | ubiquitin carrier protein E2-C (UBCH10), | | | | |
| | enzyme E2C | mRNA. /FEA = mRNA /GEN = UBCH10 | | | | |
| | | /PROD = ubiquitin carrier protein E2-C | | | | |
| | | /DB_XREF = gi: 5902145 /UG = Hs.93002 | | | | |
| | | ubiquitin carrier protein E2-C | | | | |
| | | /FL = gb: U73379.1 gb: NM_007019.1 | | | | |
| 203232_s_at | spinocerebellar | gb: NM_000332.1 /DEF = Homo sapiens | ATXN1 | 1.7 | 1.2 | −1.4 |
| | ataxia 1 | spinocerebellar ataxia 1 | | | | |
| | (olivopontocerebellar | (olivopontocerebellar ataxia 1, autosomal | | | | |
| | ataxia 1, | dominant, ataxin 1) (SCA1), mRNA. | | | | |
| | autosomal | /FEA = mRNA /GEN = SCA1 /PROD = ataxin | | | | |
| | dominant, ataxin 1) | 1 /DB_XREF = gi: 4506792 /UG = Hs.74520 | | | | |
| | | spinocerebellar ataxia 1 | | | | |
| | | (olivopontocerebellar ataxia 1, autosomal | | | | |
| | | dominant, ataxin 1) /FL = gb: NM_000332.1 | | | | |
| 204798_at | v-myb | gb: NM_005375.1 /DEF = Homo sapiens v- | MYB | 1.4 | 1.1 | −1.4 |
| | myeloblastosis | myb avian myeloblastosis viral oncogene | | | | |
| | viral oncogene | homolog (MYB), mRNA. /FEA = mRNA | | | | |
| | homolog (avian) | /GEN = MYB /PROD = v-myb avian | | | | |
| | | myeloblastosis viral oncogenehomolog | | | | |
| | | /DB_XREF = gi: 4885496 /UG = Hs.1334 v- | | | | |
| | | myb avian myeloblastosis viral oncogene | | | | |
| | | homolog /FL = gb: M15024.1 | | | | |
| | | gb: AF104863.1 gb: NM_005375.1 | | | | |
| 203887_s_at | thrombomodulin | gb: NM_000361.1 /DEF = Homo sapiens | THBD | −1.2 | 1.1 | 52.6 |
| | | thrombomodulin (THBD), mRNA. | | | | |
| | | /FEA = mRNA /GEN = THBD | | | | |
| | | /PROD = thrombomodulin | | | | |
| | | /DB_XREF = gi: 4507482 /UG = Hs.2030 | | | | |
| | | thrombomodulin /FL = gb: M16552.1 | | | | |
| | | gb: NM_000361.1 | | | | |
| 204962_s_at | centromere protein | gb: NM_001809.2 /DEF = Homo sapiens | CENPA | −1.0 | −1.0 | −52.3 |
| | A, 17 kDa | centromere protein A (17 kD) (CENPA), | | | | |
| | | mRNA. /FEA = mRNA /GEN = CENPA | | | | |
| | | /PROD = centromere protein A | | | | |
| | | /DB_XREF = gi: 4585861 /UG = Hs.1594 | | | | |
| | | centromere protein A (17 kD) | | | | |
| | | /FL = gb: NM_001809.2 gb: U14518.1 | | | | |
| 203923_s_at | cytochrome b-245, | gb: NM_000397.2 /DEF = Homo sapiens | CYBB | 1.1 | −1.2 | −1.3 |
| | beta polypeptide | cytochrome b-245, beta polypeptide | | | | |
| | (chronic | (chronic granulomatous disease) (CYBB), | | | | |
| | granulomatous | mRNA. /FEA = mRNA /GEN = CYBB | | | | |
| | disease) | /PROD = cytochrome b-245, beta | | | | |
| | | polypeptide (chronicgranulomatous | | | | |
| | | disease) /DB_XREF = gi: 6996020 | | | | |
| | | /UG = Hs.88974 cytochrome b-245, beta | | | | |
| | | polypeptide (chronic granulomatous | | | | |
| | | disease) /FL = gb: NM_000397.2 | | | | |
| 201809_s_at | endoglin (Osler- | gb: NM_000118.1 /DEF = Homo sapiens | ENG | 1.2 | −1.4 | 1.2 |
| | Rendu-Weber | endoglin (Osler-Rendu-Weber syndrome | | | | |
| | syndrome 1) | 1) (ENG), mRNA. /FEA = mRNA | | | | |
| | | /GEN = ENG /PROD = endoglin precursor | | | | |
| | | /DB_XREF = gi: 4557554 /UG = Hs.76753 | | | | |
| | | endoglin (Osler-Rendu-Weber syndrome | | | | |
| | | 1) /FL = gb: NM_000118.1 | | | | |
| 214560_at | formyl peptide | Consensus includes gb: NM_002030.2 | FPRL2 | −1.3 | −1.2 | 1.0 |
| | receptor-like 2 | /DEF = Homo sapiens formyl peptide | | | | |
| | | receptor-like 2 (FPRL2), mRNA. | | | | |
| | | /FEA = CDS /GEN = FPRL2 /PROD = formyl | | | | |
| | | peptide receptor-like 2 | | | | |
| | | /DB_XREF = gi: 4758401 /UG = Hs.158314 | | | | |
| | | formyl peptide receptor-like 2 | | | | |
| | | /FL = gb: M76673.1 gb: NM_002030.2 | | | | |
| 218039_at | nucleolar and | gb: NM_016359.1 /DEF = Homo sapiens | NUSAP1 | 1.2 | −1.2 | −1.4 |
| | spindle associated | clone HQ0310 PRO0310p1 (LOC51203), | | | | |
| | protein 1 | mRNA. /FEA = mRNA /GEN = LOC51203 | | | | |
| | | /PROD = clone HQ0310 PRO0310p1 | | | | |
| | | /DB_XREF = gi: 7705950 /UG = Hs.279905 | | | | |
| | | clone HQ0310 PRO0310p1 | | | | |
| | | /FL = gb: AF305711.1 gb: BC001308.1 | | | | |
| | | gb: AF290612.1 gb: AF090915.1 | | | | |
| | | gb: NM_016359.1 | | | | |
| 213754_s_at | tripartite motif- | Consensus includes gb: AW613203 | PAIP1 | 69.5 | 1.0 | 1.2 |
| | containing 26 | /FEA = EST /DB_XREF = gi: 7318389 | | | | |
| | | /DB_XREF = est: hh67h11.x1 | | | | |
| | | /CLONE = IMAGE: 2967909 | | | | |
| | | /UG = Hs.109643 polyadenylate binding | | | | |
| | | protein-interacting protein 1 | | | | |
| 218264_at | BRCA2 and | gb: NM_016567.1 /DEF = Homo sapiens | BCCIP | 53.2 | 50.0 | −1.0 |
| | CDKN1A | cdk inhibitor p21 binding protein (TOK-1), | | | | |
| | interacting protein | mRNA. /FEA = mRNA /GEN = TOK-1 | | | | |
| | | /PROD = cdk inhibitor p21 binding protein | | | | |
| | | /DB_XREF = gi: 7706580 /UG = Hs.279862 | | | | |
| | | cdk inhibitor p21 binding protein | | | | |
| | | /FL = gb: AB040450.1 gb: NM_016567.1 | | | | |
| 219211_at | ubiquitin specific | gb: NM_017414.1 /DEF = Homo sapiens | USP18 | −1.0 | −183.7 | 1.0 |
| | protease 18 | ubiquitin specific protease 18 (USP18), | | | | |
| | | mRNA. /FEA = mRNA /GEN = USP18 | | | | |
| | | /PROD = ubiquitin specific protease 18 | | | | |
| | | /DB_XREF = gi: 8394518 /UG = Hs.38260 | | | | |
| | | ubiquitin specific protease 18 | | | | |
| | | /FL = gb: AL136690.1 gb: AF176642.2 | | | | |
| | | gb: NM_017414.1 | | | | |
| 204638_at | acid phosphatase | gb: NM_001611.2 /DEF = Homo sapiens | ACP5 | 1.0 | −1.3 | −1.1 |
| | 5, tartrate resistant | acid phosphatase 5, tartrate resistant | | | | |
| | | (ACP5), mRNA. /FEA = mRNA | | | | |
| | | /GEN = ACP5 /PROD = tartrate resistant | | | | |
| | | acid phosphatase 5 precursor | | | | |
| | | /DB_XREF = gi: 6138970 /UG = Hs.1211 acid | | | | |
| | | phosphatase 5, tartrate resistant | | | | |
| | | /FL = gb: J04430.1 gb: NM_001611.2 | | | | |
| 206461_x_at | metallothionein 1H | gb: NM_005951.1 /DEF = Homo sapiens | MT1H | 1.2 | −1.9 | −1.2 |
| | | metallothionein 1H (MT1H), mRNA. | | | | |
| | | /FEA = mRNA /GEN = MT1H | | | | |
| | | /PROD = metallothionein 1H | | | | |
| | | /DB_XREF = gi: 10835084 /UG = Hs.2667 | | | | |
| | | metallothionein 1H /FL = gb: NM_005951.1 | | | | |
| 204641_at | NIMA (never in | gb: NM_002497.1 /DEF = Homo sapiens | NEK2 | −1.0 | −1.0 | −1.0 |
| | mitosis gene a)- | NIMA (never in mitosis gene a)-related | | | | |
| | related kinase 2 | kinase 2 (NEK2), mRNA. /FEA = mRNA | | | | |
| | | /GEN = NEK2 /PROD = NIMA (never in | | | | |
| | | mitosis gene a)-related kinase 2 | | | | |
| | | /DB_XREF = gi: 4505372 /UG = Hs.153704 | | | | |
| | | NIMA (never in mitosis gene a)-related | | | | |
| | | kinase 2 /FL = gb: NM_002497.1 | | | | |
| | | gb: U11050.1 | | | | |
| 201041_s_at | dual specificity | gb: NM_004417.2 /DEF = Homo sapiens | DUSP1 | 1.4 | −1.1 | 1.0 |
| | phosphatase 1 | dual specificity phosphatase 1 (DUSP1), | | | | |
| | | mRNA. /FEA = mRNA /GEN = DUSP1 | | | | |
| | | /PROD = dual specificity phosphatase 1 | | | | |
| | | /DB_XREF = gi: 7108342 /UG = Hs.171695 | | | | |
| | | dual specificity phosphatase 1 | | | | |
| | | /FL = gb: NM_004417.2 | | | | |
| 204531_s_at | breast cancer 1, | gb: NM_007295.1 /DEF = Homo sapiens | BRCA1 | −1.0 | −1.0 | −1.0 |
| | early onset | breast cancer 1, early onset (BRCA1), | | | | |
| | | transcript variant BRCA1b, mRNA. | | | | |
| | | /FEA = mRNA /GEN = BRCA1 | | | | |
| | | /PROD = breast cancer 1, early onset | | | | |
| | | /DB_XREF = gi: 6552300 /UG = Hs.194143 | | | | |
| | | breast cancer 1, early onset | | | | |
| | | /FL = gb: NM_007295.1 | | | | |
| 202218_s_at | fatty acid | gb: NM_004265.1 /DEF = Homo sapiens | FADS2 | −1.4 | 1.1 | −2.0 |
| | desaturase 2 | delta-6 fatty acid desaturase (FADSD6), | | | | |
| | | mRNA. /FEA = mRNA /GEN = FADSD6 | | | | |
| | | /PROD = delta-6 fatty acid desaturase | | | | |
| | | /DB_XREF = gi: 4758333 /UG = Hs.184641 | | | | |
| | | fatty acid desaturase 2 | | | | |
| | | /FL = gb: AF084559.1 gb: AF126799.1 | | | | |
| | | gb: NM_004265.1 | | | | |
| 201292_at | topoisomerase | Consensus includes gb: AL561834 | TOP2A | −1.0 | −1.0 | −1.0 |
| | (DNA) II alpha | /FEA = EST /DB_XREF = gi: 12909658 | | | | |
| | 170 kDa | /DB_XREF = est: AL561834 | | | | |
| | | /CLONE = CS0DB005YC15 (3 prime) | | | | |
| | | /UG = Hs.156346 topoisomerase (DNA) II | | | | |
| | | alpha (170 kD) /FL = gb: J04088.1 | | | | |
| | | gb: NM_001067.1 | | | | |
| 212298_at | neuropilin 1 | Consensus includes gb: BE620457 | NRP1 | 1.6 | 1.4 | 1.2 |
| | | /FEA = EST /DB_XREF = gi: 9891395 | | | | |
| | | /DB_XREF = est: 601483690F1 | | | | |
| | | /CLONE = IMAGE: 3886055 /UG = Hs.69285 | | | | |
| | | neuropilin 1 /FL = gb: AF018956.1 gb: AF016050.1 gb: NM_003873.1 | | | | |
| 204249_s_at | LIM domain only 2 | gb: NM_005574.2 /DEF = Homo sapiens | LMO2 | 1.0 | −1.5 | −1.3 |
| | (rhombotin-like 1) | LIM domain only 2 (rhombotin-like 1) | | | | |
| | | (LMO2), mRNA. /FEA = mRNA | | | | |
| | | /GEN = LMO2 /PROD = LIM domain only 2 | | | | |
| | | /DB_XREF = gi: 6633806 /UG = Hs.184585 | | | | |
| | | LIM domain only 2 (rhombotin-like 1) | | | | |
| | | /FL = gb: NM_005574.2 | | | | |
| 203167_at | tissue inhibitor of | gb: NM_003255.2 /DEF = Homo sapiens | TIMP2 | 1.2 | −1.9 | 1.1 |
| | metalloproteinase 2 | tissue inhibitor of metalloproteinase 2 | | | | |
| | | (TIMP2), mRNA. /FEA = mRNA | | | | |
| | | /GEN = TIMP2 /PROD = tissue inhibitor of | | | | |
| | | metalloproteinase 2precursor | | | | |
| | | /DB_XREF = gi: 9257247 /UG = Hs.325495 | | | | |
| | | tissue inhibitor of metalloproteinase 2 | | | | |
| | | /FL = gb: M32304.1 gb: J05593.1 | | | | |
| | | gb: NM_003255.2 | | | | |
| 214637_at | oncostatin M | Consensus includes gb: BG437034 | OSM | −1.1 | −1.0 | −1.0 |
| | | /FEA = EST /DB_XREF = gi: 13343540 | | | | |
| | | /DB_XREF = est: 602488622F1 | | | | |
| | | /CLONE = IMAGE: 4620821 | | | | |
| | | /UG = Hs.248156 oncostatin M | | | | |
| | | /FL = gb: NM_020530.1 | | | | |
| 203535_at | S100 calcium | gb: NM_002965.2 /DEF = Homo sapiens | S100A9 | −1.1 | −1.4 | −1.5 |
| | binding protein A9 | S100 calcium-binding protein A9 | | | | |
| | (calgranulin B) | (calgranulin B) (S100A9), mRNA. | | | | |
| | | /FEA = mRNA /GEN = S100A9 /PROD = S100 | | | | |
| | | calcium-binding protein A9 | | | | |
| | | /DB_XREF = gi: 9845520 /UG = Hs.112405 | | | | |
| | | S100 calcium-binding protein A9 | | | | |
| | | (calgranulin B) /FL = gb: M26311.1 | | | | |
| | | gb: NM_002965.2 | | | | |
| 221463_at | chemokine (C-C | gb: NM_002991.1 /DEF = Homo sapiens | CCL24 | 2.4 | −1.0 | −56.9 |
| | motif) ligand 24 | small inducible cytokine subfamily A (Cys- | | | | |
| | | Cys), member 24 (SCYA24), mRNA. | | | | |
| | | /FEA = CDS /GEN = SCYA24 /PROD = small | | | | |
| | | inducible cytokine subfamily A (Cys- | | | | |
| | | Cys), member 24 /DB_XREF = gi: 4506838 | | | | |
| | | /UG = Hs.247838 small inducible cytokine | | | | |
| | | subfamily A (Cys-Cys), member 24 | | | | |
| | | /FL = gb: U85768.1 gb: NM_002991.1 | | | | |
| 204194_at | BTB and CNC | gb: NM_001186.1 /DEF = Homo sapiens | BACH1 | 1.5 | −1.3 | −1.3 |
| | homology 1, basic | BTB and CNC homology 1, basic leucine | | | | |
| | leucine zipper | zipper transcription factor 1 (BACH1), | | | | |
| | transcription factor 1 | mRNA. /FEA = mRNA /GEN = BACH1 | | | | |
| | | /PROD = BTB and CNC homology 1, basic | | | | |
| | | leucine zippertranscription factor 1 | | | | |
| | | /DB_XREF = gi: 4502352 /UG = Hs.154276 | | | | |
| | | BTB and CNC homology 1, basic leucine | | | | |
| | | zipper transcription factor 1 | | | | |
| | | /FL = gb: AB002803.1 gb: NM_001186.1 | | | | |
| 210784_x_at | leukocyte | gb: AF009634.1 /DEF = Homo sapiens | LILRB3 | 1.0 | −1.2 | −1.2 |
| | immunoglobulin- | clone 17.6 immunoglobulin-like transcript | | | | |
| | like receptor, | 5 protein mRNA, complete cds. | | | | |
| | subfamily B (with | /FEA = mRNA /PROD = immunoglobulin-like | | | | |
| | TM and ITIM | transcript 5 protein /DB_XREF = gi: 2662427 | | | | |
| | domains), member 3 | /UG = Hs.105928 leukocyte immunoglobulin | | | | |
| | | like receptor, subfamily B (with TM and | | | | |
| | | ITIM domains), member 3 | | | | |
| | | /FL = gb: AF009634.1 gb: AF009636.1 | | | | |
| | | gb: AF009640.1 | | | | |
| 201785_at | ribonuclease, | gb: NM_002933.1 /DEF = Homo sapiens | RNASE1 | 1.0 | 1.2 | 2.2 |
| | RNase A family, 1 | ribonuclease, RNase A family, 1 | | | | |
| | (pancreatic) | (pancreatic) (RNASE1), mRNA. | | | | |
| | | /FEA = mRNA /GEN = RNASE1 | | | | |
| | | /PROD = ribonuclease, RNase A family, 1 | | | | |
| | | (pancreatic) /DB_XREF = gi: 4506546 | | | | |
| | | /UG = Hs.78224 ribonuclease, RNase A | | | | |
| | | family, 1 (pancreatic) /FL = gb: BC005324.1 | | | | |
| | | gb: NM_002933.1 gb: D26129.1 | | | | |
| 214146_s_at | pro-platelet basic | Consensus includes gb: R64130 | PPBP | 1.5 | 1.1 | 1.6 |
| | protein (chemokine | /FEA = EST /DB_XREF = gi: 836009 | | | | |
| | (C—X—C motif) | /DB_XREF = est: yi18h03.s1 | | | | |
| | ligand 7) | /CLONE = IMAGE: 139637 /UG = Hs.2164 | | | | |
| | | pro-platelet basic protein (includes platelet | | | | |
| | | basic protein, beta-thromboglobulin, | | | | |
| | | connective tissue-activating peptide III, | | | | |
| | | neutrophil-activating peptide-2) | | | | |
| 206214_at | phospholipase A2, | gb: NM_005084.1 /DEF = Homo sapiens | PLA2G7 | 1.2 | −1.3 | 1.1 |
| | group VII (platelet- | phospholipase A2, group VII (platelet- | | | | |
| | activating factor | activating factor acetylhydrolase, plasma) | | | | |
| | acetylhydrolase, | (PLA2G7), mRNA. /FEA = mRNA | | | | |
| | plasma) | /GEN = PLA2G7 /PROD = phospholipase | | | | |
| | | A2, group VII (platelet-activatingfactor | | | | |
| | | acetylhydrolase, plasma) | | | | |
| | | /DB_XREF = gi: 4826883 /UG = Hs.93304 | | | | |
| | | phospholipase A2, group VII (platelet- | | | | |
| | | activating factor acetylhydrolase, plasma) | | | | |
| | | /FL = gb: U24577.1 gb: NM_005084.1 | | | | |
| | | gb: U20157.1 | | | | |
| 218355_at | kinesin family member | gb: NM_012310.2 /DEF = Homo | KIF4A | −1.0 | −1.0 | −1.0 |
| | | sapiens kinesin family member 4A | | | | |
| | | (KIF4A), mRNA. /FEA = mRNA | | | | |
| | | /GEN = KIF4A /PROD = kinesin | | | | |
| | | family member 4 | | | | |
| | | /DB_XREF = gi: 7305204 | | | | |
| | | /UG = Hs.279766 kinesin family | | | | |
| | | member 4A /FL = gb: AF179308.1 | | | | |
| | | gb: AF071592.2 gb: NM_012310.2 | | | | |
| 216950_s_at | Fc fragment of IgG, hi [symbol] | Consensus includes gb: X14355.1 | FCGR1A | 1.0 | −1.1 | −1.2 |
| | | /DEF = Human mRNA for high | | | | |
| | | affinity Fc receptor (FcRI) b form. | | | | |
| | | /FEA = mRNA /DB_XREF = gi: 31333 | | | | |
| | | /UG = Hs.77424 Fc fragment of | | | | |
| | | IgG, high affinity Ia, receptor for | | | | |
| | | (CD64) | | | | |
| 209464_at | aurora kinase B | gb: AB011446.1 /DEF = Homo | AURKB | −1.0 | −1.0 | −1.1 |
| | | sapiens mRNA for Aik2, complete | | | | |
| | | cds. /FEA = mRNA /GEN = aik2 | | | | |
| | | /PROD = Aik2 | | | | |
| | | /DB_XREF = gi: 5688865 | | | | |
| | | /UG = Hs.180655 serinethreonine | | | | |
| | | kinase 12 /FL = gb: BC000442.1 | | | | |
| | | gb: AF004022.1 gb: AF008552.1 | | | | |
| | | gb: AB011450.1 gb: AF015254.1 | | | | |
| | | gb: NM_004217.1 gb: AB011446.1 | | | | |
| 202191_s_at | growth arrest-specific | Consensus includes gb: BE439987 | GAS7 | 1.2 | −1.4 | −1.1 |
| | | /FEA = EST /DB_XREF = gi: 9439470 | | | | |
| | | /DB_XREF = est: HTM1-745F | | | | |
| | | /UG = Hs.226133 growth arrest- | | | | |
| | | specific 7 /FL = gb: AB007854.1 | | | | |
| | | gb: NM_005890.1 | | | | |
| 205769_at | solute carrier family 27 | gb: NM_003645.1 /DEF = Homo | SLC27A2 | −1.0 | −1.0 | −1.0 |
| | | sapiens fatty-acid-Coenzyme A | | | | |
| | | ligase, very long-chain 1 | | | | |
| | | (FACVL1), mRNA. /FEA = mRNA | | | | |
| | | /GEN = FACVL1 /PROD = very long- | | | | |
| | | chain fatty-acid-Coenzyme A | | | | |
| | | ligase 1 /DB_XREF = gi: 4503652 | | | | |
| | | /UG = Hs.11729 fatty-acid- | | | | |
| | | Coenzyme A ligase, very long- | | | | |
| | | chain 1 /FL = gb: D88308.1 | | | | |
| | | gb: AF096290.1 gb: NM_003645.1 | | | | |
| 209714_s_at | cyclin-dependent kinas | gb: AF213033.1 /DEF = Homo | CDKN3 | −1.3 | −1.0 | −1.2 |
| | | sapiens isolate BX-01 cyclin- | | | | |
| | | dependent kinase associated | | | | |
| | | protein phosphatase mRNA, | | | | |
| | | complete cds. /FEA = mRNA | | | | |
| | | /PROD = cyclin-dependent kinase | | | | |
| | | associated proteinphosphatase | | | | |
| | | /DB_XREF = gi: 12734643 | | | | |
| | | /UG = Hs.84113 cyclin-dependent | | | | |
| | | kinase inhibitor 3 (CDK2- | | | | |
| | | associated dual specificity | | | | |
| | | phosphatase) /FL = gb: AF213033.1 | | | | |
| | | gb: AF213034.1 gb: AF213035.1 | | | | |
| | | gb: AF213036.1 gb: AF213037.1 | | | | |
| | | gb: AF213038.1 gb: AF213039.1 | | | | |
| | | gb: AF213040.1 gb: AF213041.1 | | | | |
| | | gb: AF213042.1 gb: AF213044.1 | | | | |
| | | gb: AF213046.1 gb: AF213047.1 | | | | |
| | | gb: AF213048.1 gb: AF213049.1 | | | | |
| | | gb: AF213050.1 gb: AF213051.1 | | | | |
| | | gb: AF213052.1 gb: AF213053.1 | | | | |
| | | gb: U02681.1 gb: L25876.1 | | | | |
| | | gb: NM_005192.1 gb: L27711.1 | | | | |
| 203145_at | sperm associated anti [symbol] | gb: NM_006461.1 /DEF = Homo | SPAG5 | 1.1 | 1.3 | 94.7 |
| | | sapiens mitotic spindle coiled-coil | | | | |
| | | related protein (DEEPEST), | | | | |
| | | mRNA. /FEA = mRNA | | | | |
| | | /GEN = DEEPEST /PROD = mitotic | | | | |
| | | spindle coiled-coil related protein | | | | |
| | | /DB_XREF = gi: 5453631 | | | | |
| | | /UG = Hs.16244 mitotic spindle | | | | |
| | | coiled-coil related protein | | | | |
| | | /FL = gb: BC000322.1 | | | | |
| | | gb: AF063308.1 gb: NM_006461.1 | | | | |
| 205119_s_at | formyl peptide recepto | gb: NM_002029.1 /DEF = Homo | | 1.3 | −1.0 | −1.4 |
| | | sapiens formyl peptide receptor 1 | | | | |
| | | (FPR1), mRNA. /FEA = mRNA | | | | |
| | | /GEN = FPR1 /PROD = formyl | | | | |
| | | peptide receptor 1 | | | | |
| | | /DB_XREF = gi: 4503778 | | | | |
| | | /UG = Hs.753 formyl peptide | | | | |
| | | receptor 1 /FL = gb: BC005315.1 | | | | |
| | | gb: M60626.1 gb: M60627.1 | | | | |
| | | gb: NM_002029.1 | | | | |
| 204759_at | chromosome condens [symbol] | gb: NM_001268.1 /DEF = Homo | CHC1L | 1.6 | −1.0 | 1.2 |
| | | sapiens chromosome | | | | |
| | | condensation 1-like (CHC1L), | | | | |
| | | mRNA. /FEA = mRNA | | | | |
| | | /GEN = CHC1L /PROD = RCC1-like | | | | |
| | | G exchanging factor RLG | | | | |
| | | /DB_XREF = gi: 4557444 | | | | |
| | | /UG = Hs.27007 chromosome | | | | |
| | | condensation 1-like | | | | |
| | | /FL = gb: AF060219.1 | | | | |
| | | gb: NM_001268.1 | | | | |
| 201666_at | tissue inhibitor of meta | gb: NM_003254.1 /DEF = Homo | TIMP1 | 1.0 | −1.3 | 1.0 |
| | | sapiens tissue inhibitor of | | | | |
| | | metalloproteinase 1 (erythroid | | | | |
| | | potentiating activity, collagenase | | | | |
| | | inhibitor) (TIMP1), mRNA. | | | | |
| | | /FEA = mRNA /GEN = TIMP1 | | | | |
| | | /PROD = tissue inhibitor of | | | | |
| | | metalloproteinase 1precursor | | | | |
| | | /DB_XREF = gi: 4507508 | | | | |
| | | /UG = Hs.5831 tissue inhibitor of | | | | |
| | | metalloproteinase 1 (erythroid | | | | |
| | | potentiating activity, collagenase | | | | |
| | | inhibitor) /FL = gb: BC000866.1 | | | | |
| | | gb: M12670.1 gb: M59906.1 | | | | |
| | | gb: NM_003254.1 | | | | |
| 217996_at | pleckstrin homology-lik | Consensus includes gb: AA576961 | PHLDA1 | 1.2 | 63.7 | −66.0 |
| | | /FEA = EST /DB_XREF = gi: 2354435 | | | | |
| | | /DB_XREF = est: nm82d08.s1 | | | | |
| | | /CLONE = IMAGE: 1074735 | | | | |
| | | /UG = Hs.82101 pleckstrin | | | | |
| | | homology-like domain, family A, | | | | |
| | | member 1 /FL = gb: NM_007350.1 | | | | |
| 209709_s_at | hyaluronan-mediated r | gb: U29343.1 /DEF = Homo sapiens | HMMR | −71.2 | −1.0 | −74.3 |
| | | hyaluronan receptor (RHAMM) | | | | |
| | | mRNA, complete cds. | | | | |
| | | /FEA = mRNA /GEN = RHAMM | | | | |
| | | /PROD = hyaluronan receptor | | | | |
| | | /DB_XREF = gi: 2959555 | | | | |
| | | /UG = Hs. 72550 hyaluronan- | | | | |
| | | mediated motility receptor | | | | |
| | | (RHAMM) /FL = gb: U29343.1 | | | | |
| | | gb: AF032862.1 gb: NM_012484.1 | | | | |
| 202388_at | regulator of G-protein [symbol] | gb: NM_002923.1 /DEF = Homo | RGS2 | 1.4 | 1.2 | 1.3 |
| | | sapiens regulator of G-protein | | | | |
| | | signalling 2, 24 kD (RGS2), mRNA. | | | | |
| | | /FEA = mRNA /GEN = RGS2 | | | | |
| | | /PROD = regulator of G-protein | | | | |
| | | signalling 2, 24 kD | | | | |
| | | /DB_XREF = gi: 4506516 | | | | |
| | | /UG = Hs.78944 regulator of G- | | | | |
| | | protein signalling 2, 24 kD | | | | |
| | | /FL = gb: L13463.1 | | | | |
| | | gb: NM_002923.1 | | | | |
| 204092_s_at | serine/threonine kinas [symbol] | gb: NM_003600.1 /DEF = Homo | STK6 | −1.0 | −60.9 | 55.8 |
| | | sapiens serinethreonine kinase 15 | | | | |
| | | (STK15), mRNA. /FEA = mRNA | | | | |
| | | /GEN = STK15 | | | | |
| | | /PROD = serinethreonine kinase 15 | | | | |
| | | /DB_XREF = gi: 4507274 | | | | |
| | | /UG = Hs.48915 serinethreonine | | | | |
| | | kinase 15 /FL = gb: AF008551.1 | | | | |
| | | gb: AF011468.1 gb: NM_003600.1 | | | | |
| 204446_s_at | arachidonate 5-lipoxyg | gb: NM_000698.1 /DEF = Homo | ALOX5 | 1.2 | −1.3 | −1.3 |
| | | sapiens arachidonate 5- | | | | |
| | | lipoxygenase (ALOX5), mRNA. | | | | |
| | | /FEA = mRNA /GEN = ALOX5 | | | | |
| | | /PROD = arachidonate 5- | | | | |
| | | lipoxygenase | | | | |
| | | /DB_XREF = gi: 4502056 | | | | |
| | | /UG = Hs.89499 arachidonate 5- | | | | |
| | | lipoxygenase /FL = gb: J03600.1 | | | | |
| | | gb: J03571.1 gb: NM_000698.1 | | | | |
| 203126_at | inositol(myo)-1(or 4)- [symbol] | gb: NM_014214.1 /DEF = Homo | IMPA2 | −1.0 | −1.7 | 1.0 |
| | | sapiens inositol(myo)-1(or 4)- | | | | |
| | | monophosphatase 2 (IMPA2), | | | | |
| | | mRNA. /FEA = mRNA | | | | |
| | | /GEN = IMPA2 | | | | |
| | | /PROD = inositol(myo)-1(or 4)- | | | | |
| | | monophosphatase 2 | | | | |
| | | /DB_XREF = gi: 7657235 | | | | |
| | | /UG = Hs.5753 inositol(myo)-1(or 4)- | | | | |
| | | monophosphatase 2 | | | | |
| | | /FL = gb: AF200432.1 | | | | |
| | | gb: NM_014214.1 gb: AF014398.2 | | | | |
| 208581_x_at | metallothionein 1X | gb: NM_005952.1 /DEF = Homo | MT1X | 1.2 | −1.4 | −1.5 |
| | | sapiens metallothionein 1X | | | | |
| | | (MT1X), mRNA. /FEA = CDS | | | | |
| | | /GEN = MT1X | | | | |
| | | /PROD = metallothionein 1X | | | | |
| | | /DB_XREF = gi: 10835231 | | | | |
| | | /UG = Hs.278462 metallothionein | | | | |
| | | 1X /FL = gb: NM_005952.1 | | | | |
| 219890_at | C-type (calcium depen [symbol] | gb: NM_013252.1 /DEF = Homo | CLECSF5 | 1.5 | −1.0 | −1.2 |
| | | sapiens C-type (calcium | | | | |
| | | dependent, carbohydrate- | | | | |
| | | recognition domain) lectin, | | | | |
| | | superfamily member 5 | | | | |
| | | (CLECSF5), mRNA. /FEA = mRNA | | | | |
| | | /GEN = CLECSF5 /PROD = C-type | | | | |
| | | (calcium dependent, carbohydrate- | | | | |
| | | recognition domain) lectin, | | | | |
| | | superfamilymember 5 | | | | |
| | | /DB_XREF = gi: 10281668 | | | | |
| | | /UG = Hs.126355 C-type (calcium | | | | |
| | | dependent, carbohydrate- | | | | |
| | | recognition domain) lectin, | | | | |
| | | superfamily member 5 | | | | |
| | | /FL = gb: NM_013252.1 | | | | |
| | | gb: AF139768.1 | | | | |
| 209773_s_at | ribonucleotide reducta [symbol] | gb: BC001886.1 /DEF = Homo | RRM2 | −1.9 | −1.5 | −1.5 |
| | | sapiens, ribonucleotide reductase | | | | |
| | | M2 polypeptide, clone MGC: 1551, | | | | |
| | | mRNA, complete cds. | | | | |
| | | /FEA = mRNA | | | | |
| | | /PROD = ribonucleotide reductase | | | | |
| | | M2 polypeptide | | | | |
| | | /DB_XREF = gi: 12804874 | | | | |
| | | /UG = Hs.75319 ribonucleotide | | | | |
| | | reductase M2 polypeptide | | | | |
| | | /FL = gb: BC001886.1 | | | | |
| 202705_at | cyclin B2 | gb: NM_004701.2 /DEF = Homo | CCNB2 | −1.0 | −1.3 | 1.0 |
| | | sapiens cyclin B2 (CCNB2), | | | | |
| | | mRNA. /FEA = mRNA | | | | |
| | | /GEN = CCNB2 /PROD = cyclin B2 | | | | |
| | | /DB_XREF = gi: 10938017 | | | | |
| | | /UG = Hs.194698 cyclin B2 | | | | |
| | | /FL = gb: NM_004701.2 | | | | |
| | | gb: AF002822.1 gb: AB020981.1 | | | | |
| | | gb: AL080146.1 | | | | |
| 205098_at | chemokine (C-C motif) | Consensus includes gb: AI421071 | | −1.1 | −1.7 | −1.1 |
| | | /FEA = EST /DB_XREF = gi: 4267002 | | | | |
| | | /DB_XREF = est: tf24a02.x1 | | | | |
| | | /CLONE = IMAGE: 2097098 | | | | |
| | | /UG = Hs.301921 chemokine (C-C | | | | |
| | | motif) receptor 1 /FL = gb: L09230.1 | | | | |
| | | gb: L10918.1 gb: NM_001295.1 | | | | |
| 204438_at | mannose receptor, C t [symbol] | gb: NM_002438.1 /DEF = Homo | MRC1 | 1.1 | −1.5 | −1.6 |
| | | sapiens mannose receptor, C type | | | | |
| | | 1 (MRC1), mRNA. /FEA = mRNA | | | | |
| | | /GEN = MRC1 /PROD = mannose | | | | |
| | | receptor, C type 1 | | | | |
| | | /DB_XREF = gi: 4505244 | | | | |
| | | /UG = Hs.75182 mannose receptor, | | | | |
| | | C type 1 /FL = gb: J05550.1 | | | | |
| | | gb: NM_002438.1 | | | | |
| 201438_at | collagen, type VI, alpha [symbol] | gb: NM_004369.1 /DEF = Homo | COL6A3 | −1.0 | −1.0 | −1.0 |
| | | sapiens collagen, type VI, alpha 3 | | | | |
| | | (COL6A3), mRNA. /FEA = mRNA | | | | |
| | | /GEN = COL6A3 /PROD = collagen, | | | | |
| | | type VI, alpha 3 | | | | |
| | | /DB_XREF = gi: 4758027 | | | | |
| | | /UG = Hs.80988 collagen, type VI, | | | | |
| | | alpha 3 /FL = gb: NM_004369.1 | | | | |
| 207067_s_at | histidine decarboxylase [symbol] | gb: NM_002112.1 /DEF = Homo | HDC | −1.3 | −1.0 | −1.2 |
| | | sapiens histidine decarboxylase | | | | |
| | | (HDC), mRNA. /FEA = mRNA | | | | |
| | | /GEN = HDC /PROD = histidine | | | | |
| | | decarboxylase | | | | |
| | | /DB_XREF = gi: 4504364 | | | | |
| | | /UG = Hs.1481 histidine | | | | |
| | | decarboxylase /FL = gb: M60445.1 | | | | |
| | | gb: NM_002112.1 | | | | |
| 220088_at | G protein-coupled rece [symbol] | gb: NM_001736.1 /DEF = Homo | C5R1 | 1.2 | −1.1 | 1.1 |
| | | sapiens complement component 5 | | | | |
| | | receptor 1 (C5a ligand) (C5R1), | | | | |
| | | mRNA. /FEA = mRNA /GEN = C5R1 | | | | |
| | | /PROD = complement component 5 | | | | |
| | | receptor 1 (C5a ligand) | | | | |
| | | /DB_XREF = gi: 4502508 | | | | |
| | | /UG = Hs.2161 complement | | | | |
| | | component 5 receptor 1 (C5a | | | | |
| | | ligand) /FL = gb: M62505.1 | | | | |
| | | gb: NM_001736.1 | | | | |
| 204614_at | serine (or cysteine) pro [symbol] | gb: NM_002575.1 /DEF = Homo | SERPINB2 | 1.4 | 1.2 | 1.3 |
| | | sapiens serine (or cysteine) | | | | |
| | | proteinase inhibitor, clade B | | | | |
| | | (ovalbumin), member 2 | | | | |
| | | (SERPINB2), mRNA. | | | | |
| | | /FEA = mRNA /GEN = SERPINB2 | | | | |
| | | /PROD = serine (or cysteine) | | | | |
| | | proteinase inhibitor, cladeB | | | | |
| | | (ovalbumin), member 2 | | | | |
| | | /DB_XREF = gi: 4505594 | | | | |
| | | /UG = Hs.75716 serine (or | | | | |
| | | cysteine) proteinase inhibitor, | | | | |
| | | clade B (ovalbumin), member 2 | | | | |
| | | /FL = gb: J02685.1 gb: J03603.1 | | | | |
| | | gb: M18082.1 gb: NM_002575.1 | | | | |
| 204039_at | CCAAT/enhancer bind [symbol] | gb: NM_004364.1 /DEF = Homo | CEBPA | 1.3 | −1.1 | −1.1 |
| | | sapiens CCAATenhancer binding | | | | |
| | | protein (CEBP), alpha (CEBPA), | | | | |
| | | mRNA. /FEA = mRNA | | | | |
| | | /GEN = CEBPA | | | | |
| | | /PROD = CCAATenhancer binding | | | | |
| | | protein (CEBP), alpha | | | | |
| | | /DB_XREF = gi: 4757971 | | | | |
| | | /UG = Hs.76171 CCAATenhancer | | | | |
| | | binding protein (CEBP), alpha | | | | |
| | | /FL = gb: NM_004364.1 | | | | |
| 205786_s_at | integrin, alpha M (com [symbol] | gb: NM_000632.2 /DEF = Homo | ITGAM | 1.0 | −1.2 | −1.6 |
| | | sapiens integrin, alpha M | | | | |
| | | (complement component receptor | | | | |
| | | 3, alpha; also known as CD11b | | | | |
| | | (p170), macrophage antigen alpha | | | | |
| | | polypeptide) (ITGAM), mRNA. | | | | |
| | | /FEA = mRNA /GEN = ITGAM | | | | |
| | | /PROD = integrin alpha M precursor | | | | |
| | | /DB_XREF = gi: 6006013 | | | | |
| | | /UG = Hs.172631 integrin, alpha M | | | | |
| | | (complement component receptor | | | | |
| | | 3, alpha; also known as CD11b | | | | |
| | | (p170), macrophage antigen alpha | | | | |
| | | polypeptide) /FL = gb: J03925.1 | | | | |
| | | gb: NM_000632.2 | | | | |
| 201739_at | serum/glucocorticoid re [symbol] | gb: NM_005627.1 /DEF = Homo | SGK | 1.3 | 1.0 | 1.0 |
| | | sapiens serumglucocorticoid | | | | |
| | | regulated kinase (SGK), mRNA. | | | | |
| | | /FEA = mRNA /GEN = SGK | | | | |
| | | /PROD = serumglucocorticoid | | | | |
| | | regulated kinase | | | | |
| | | /DB_XREF = gi: 5032090 | | | | |
| | | /UG = Hs.296323 | | | | |
| | | serumglucocorticoid regulated | | | | |
| | | kinase /FL = gb: BC001263.1 | | | | |
| | | gb: NM_005627.1 gb: AF153609.1 | | | | |
| 209949_at | neutrophil cytosolic fac [symbol] | gb: BC001606.1 /DEF = Homo | NCF2 | 1.2 | −1.4 | −1.5 |
| | | sapiens, Similar to neutrophil | | | | |
| | | cytosolic factor 2 (65 kD, chronic | | | | |
| | | granulomatous disease, | | | | |
| | | autosomal 2), clone MGC: 2275, | | | | |
| | | mRNA, complete cds. | | | | |
| | | /FEA = mRNA /PROD = Similar to | | | | |
| | | neutrophil cytosolic factor 2 | | | | |
| | | (65 kD, chronic granulomatous | | | | |
| | | disease, autosomal 2) | | | | |
| | | /DB_XREF = gi: 12804408 | | | | |
| | | /UG = Hs.949 neutrophil cytosolic | | | | |
| | | factor 2 (65 kD, chronic | | | | |
| | | granulomatous disease, | | | | |
| | | autosomal 2) /FL = gb: BC001606.1 | | | | |
| | | gb: M32011.1 gb: NM_000433.1 | | | | |
| 221210_s_at | N-acetylneuraminate p [symbol] | gb: NM_030769.1 /DEF = Homo | NPL | 1.5 | −1.1 | 1.1 |
| | | sapiens hypothetical protein | | | | |
| | | similar to swine acylneuraminate | | | | |
| | | lyase (C1ORF13), mRNA. | | | | |
| | | /FEA = mRNA /GEN = C1ORF13 | | | | |
| | | /PROD = hypothetical protein | | | | |
| | | similar to swineacylneuraminate | | | | |
| | | lyase /DB_XREF = gi: 13540532 | | | | |
| | | /FL = gb: NM_030769.1 | | | | |
| 203554_x_at | pituitary tumor-transfor [symbol] | gb: NM_004219.2 /DEF = Homo | PTTG1 | −1.5 | −1.2 | −1.2 |
| | | sapiens pituitary tumor- | | | | |
| | | transforming 1 (PTTG1), mRNA. | | | | |
| | | /FEA = mRNA /GEN = PTTG1 | | | | |
| | | /PROD = pituitary tumor- | | | | |
| | | transforming protein 1 | | | | |
| | | /DB_XREF = gi: 11038651 | | | | |
| | | /UG = Hs.252587 pituitary tumor- | | | | |
| | | transforming 1 | | | | |
| | | /FL = gb: NM_004219.2 | | | | |
| | | gb: AF095287.1 gb: AF062649.1 | | | | |
| | | gb: AF075242.1 | | | | |
| 210184_at | integrin, alpha X (antig [symbol] | gb: M81695.1 /DEF = H. sapiens | ITGAX | 1.1 | −1.0 | −1.2 |
| | | leukocyte adhesion glycoprotein | | | | |
| | | p150, 95 mRNA, complete cds. | | | | |
| | | /FEA = mRNA /GEN = ITGAX | | | | |
| | | /DB_XREF = gi: 487829 | | | | |
| | | /UG = Hs.51077 integrin, alpha X | | | | |
| | | (antigen CD11C (p150), alpha | | | | |
| | | polypeptide) /FL = gb: M81695.1 | | | | |
| | | gb: NM_000887.2 | | | | |
| 208079_s_at | serine/threonine kinase [symbol] | gb: NM_003158.1 /DEF = Homo | STK6 | −1.0 | −1.0 | 1.1 |
| | | sapiens serinethreonine kinase 6 | | | | |
| | | (STK6), mRNA. /FEA = mRNA | | | | |
| | | /GEN = STK6 | | | | |
| | | /PROD = serinethreonine kinase 6 | | | | |
| | | /DB_XREF = gi: 4507278 | | | | |
| | | /UG = Hs.250822 serinethreonine | | | | |
| | | kinase 6 /FL = gb: D84212.1 | | | | |
| | | gb: NM_003158.1 | | | | |
| 202240_at | polo-like kinase 1 (Dro [symbol] | gb: NM_005030.1 /DEF = Homo | PLK1 | −78.4 | 61.4 | −1.8 |
| | | sapiens polo (Drosophia)-like | | | | |
| | | kinase (PLK), mRNA. | | | | |
| | | /FEA = mRNA /GEN = PLK | | | | |
| | | /PROD = polo (Drosophia)-like | | | | |
| | | kinase /DB_XREF = gi: 4826915 | | | | |
| | | /UG = Hs.77597 polo (Drosophia)- | | | | |
| | | like kinase /FL = gb: BC002369.1 | | | | |
| | | gb: BC003002.1 gb: U01038.1 | | | | |
| | | gb: L19559.1 gb: NM_005030.1 | | | | |
| 217762_s_at | RAB31, member RAS | Consensus includes gb: BE789881 | RAB31 | 1.3 | −1.3 | −1.1 |
| | | /FEA = EST | | | | |
| | | /DB_XREF = gi: 10211079 | | | | |
| | | /DB_XREF = est: 601476750F1 | | | | |
| | | /CLONE = IMAGE: 3879493 | | | | |
| | | /UG = Hs.223025 RAB31, member | | | | |
| | | RAS oncogene family | | | | |
| | | /FL = gb: AF234995.1 | | | | |
| | | gb: BC001148.1 gb: U59877.1 | | | | |
| | | gb: U57091.1 gb: NM_006868.1 | | | | |
| | | gb: AF183421.1 | | | | |
| 215925_s_at | CD72 antigen | Consensus includes | CD72 | 69.7 | −1.4 | 1.4 |
| | | gb: AF283777.2 /DEF = Homo | | | | |
| | | sapiens clone TCBAP0702 mRNA | | | | |
| | | sequence. /FEA = mRNA | | | | |
| | | /DB_XREF = gi: 10281735 | | | | |
| | | /UG = Hs.116481 CD72 antigen | | | | |
| 201422_at | interferon, gamma-ind [symbol] | gb: NM_006332.1 /DEF = Homo | IFI30 | −1.4 | −1.1 | −1.1 |
| | | sapiens interferon, gamma- | | | | |
| | | inducible protein 30 (IFI30), | | | | |
| | | mRNA. /FEA = mRNA /GEN = IFI30 | | | | |
| | | /PROD = interferon, gamma- | | | | |
| | | inducible protein 30 | | | | |
| | | /DB_XREF = gi: 5453695 | | | | |
| | | /UG = Hs.14623 interferon, gamma- | | | | |
| | | inducible protein 30 | | | | |
| | | /FL = gb: J03909.1 gb: NM_006332.1 | | | | |
| | | gb: AF097362.1 | | | | |
| 218559_s_at | v-maf musculoaponeu [symbol] | gb: NM_005461.1 /DEF = Homo | MAFB | 1.1 | −1.5 | 1.1 |
| | | sapiens Kreisler (mouse) maf- | | | | |
| | | related leucine zipper homolog | | | | |
| | | (KRML), mRNA. /FEA = mRNA | | | | |
| | | /GEN = KRML /PROD = Kreisler | | | | |
| | | (mouse) maf-related leucine | | | | |
| | | zipperhomolog | | | | |
| | | /DB_XREF = gi: 4885446 | | | | |
| | | /UG = Hs.169487 Kreisler (mouse) | | | | |
| | | maf-related leucine zipper | | | | |
| | | homolog /FL = gb: AF134157.1 | | | | |
| | | gb: NM_005461.1 | | | | |
| 202241_at | tribbles homolog 1 (Dr [symbol] | gb: NM_025195.1 /DEF = Homo | TRIB1 | 1.4 | −1.3 | 1.1 |
| | | sapiens phosphoprotein regulated | | | | |
| | | by mitogenic pathways (C8FW), | | | | |
| | | mRNA. /FEA = mRNA | | | | |
| | | /GEN = C8FW /PROD = G-protein- | | | | |
| | | coupled receptor induced protein | | | | |
| | | /DB_XREF = gi: 13399327 | | | | |
| | | /UG = Hs.7837 phosphoprotein | | | | |
| | | regulated by mitogenic pathways | | | | |
| | | /FL = gb: AF205437.1 | | | | |
| | | gb: NM_025195.1 | | | | |
| 210004_at | oxidised low density lip [symbol] | gb: AF035776.1 /DEF = Homo | OLR1 | 1.2 | −1.6 | −2.0 |
| | | sapiens oxidized low-density | | | | |
| | | lipoprotein receptor mRNA, | | | | |
| | | complete cds. /FEA = mRNA | | | | |
| | | /PROD = oxidized low-density | | | | |
| | | lipoprotein receptor | | | | |
| | | /DB_XREF = gi: 3941299 | | | | |
| | | /UG = Hs.77729 oxidised low | | | | |
| | | density lipoprotein (lectin-like) | | | | |
| | | receptor 1 /FL = gb: AB010710.1 | | | | |
| | | gb: AF035776.1 gb: NM_002543.1 | | | | |
| 203755_at | BUB1 budding uninhib [symbol] | gb: NM_001211.2 /DEF = Homo | BUB1B | −1.1 | −1.3 | −1.1 |
| | | sapiens budding uninhibited by | | | | |
| | | benzimidazoles 1 (yeast | | | | |
| | | homolog), beta (BUB1B), mRNA. | | | | |
| | | /FEA = mRNA /GEN = BUB1B | | | | |
| | | /PROD = budding uninhibited by | | | | |
| | | benzimidazoles 1 (yeasthomolog), | | | | |
| | | beta /DB_XREF = gi: 5729749 | | | | |
| | | /UG = Hs.36708 budding | | | | |
| | | uninhibited by benzimidazoles 1 | | | | |
| | | (yeast homolog), beta | | | | |
| | | /FL = gb: AF053306.1 | | | | |
| | | gb: AF035933.1 gb: AF068760.1 | | | | |
| | | gb: AF046918.1 gb: AF107297.1 | | | | |
| | | gb: AF046079.2 gb: NM_001211.2 | | | | |
| 204072_s_at | hypothetical protein C [symbol] | gb: NM_023037.1 /DEF = Homo | 13CDNA73 | 1.3 | 1.2 | −1.5 |
| | | sapiens putative gene product | | | | |
| | | (13CDNA73), mRNA. | | | | |
| | | /FEA = mRNA /GEN = 13CDNA73 | | | | |
| | | /PROD = putative gene product | | | | |
| | | /DB_XREF = gi: 12957487 | | | | |
| | | /UG = Hs.181304 putative gene | | | | |
| | | product /FL = gb: NM_023037.1 | | | | |
| 202870_s_at | CDC20 cell division cy [symbol] | gb: NM_001255.1 /DEF = Homo | CDC20 | −1.0 | −1.0 | −63.0 |
| | | sapiens CDC20 (cell division cycle | | | | |
| | | 20, S. cerevisiae, homolog) | | | | |
| | | (CDC20), mRNA. /FEA = mRNA | | | | |
| | | /GEN = CDC20 /PROD = cell | | | | |
| | | division cycle 20 | | | | |
| | | /DB_XREF = gi: 4557436 | | | | |
| | | /UG = Hs.82906 CDC20 (cell | | | | |
| | | division cycle 20, S. cerevisiae, | | | | |
| | | homolog) /FL = gb: BC001088.1 | | | | |
| | | gb: AF099644.1 gb: NM_001255.1 | | | | |
| | | gb: U05340.1 | | | | |
| 220832_at | toll-like receptor 8 | gb: NM_016610.1 /DEF = Homo | TLR8 | 1.4 | −2.0 | −95.0 |
| | | sapiens Toll-like receptor 8 | | | | |
| | | (LOC51311), mRNA. /FEA = mRNA | | | | |
| | | /GEN = LOC51311 /PROD = Toll-like | | | | |
| | | receptor 8 /DB_XREF = gi: 7706147 | | | | |
| | | /UG = Hs.272410 Toll-like receptor | | | | |
| | | 8 /FL = gb: AF246971.1 | | | | |
| | | gb: NM_016610.1 gb: AF245703.1 | | | | |
| 211519_s_at | kinesin family member | gb: AY026505.1 /DEF = Homo | KIF2C | −1.4 | −1.1 | −1.1 |
| | | sapiens testis specific mitotic | | | | |
| | | centromere-associated kinesin | | | | |
| | | mRNA, complete cds. | | | | |
| | | /FEA = mRNA /PROD = testis | | | | |
| | | specific mitotic centromere- | | | | |
| | | associatedkinesin | | | | |
| | | /DB_XREF = gi: 13432054 | | | | |
| | | /UG = Hs.69360 kinesin-like 6 | | | | |
| | | (mitotic centromere-associated | | | | |
| | | kinesin) /FL = gb: AY026505.1 | | | | |
| 202954_at | ubiquitin-conjugating e [symbol] | gb: NM_007019.1 /DEF = Homo | UBE2C | −1.1 | 1.0 | −1.1 |
| | | sapiens ubiquitin carrier protein E2 | | | | |
| | | C (UBCH10), mRNA. /FEA = mRNA | | | | |
| | | /GEN = UBCH10 /PROD = ubiquitin | | | | |
| | | carrier protein E2-C | | | | |
| | | /DB_XREF = gi: 5902145 | | | | |
| | | /UG = Hs.93002 ubiquitin carrier | | | | |
| | | protein E2-C /FL = gb: U73379.1 | | | | |
| | | gb: NM_007019.1 | | | | |
| 204798_at | v-myb myeloblastosis [symbol] | gb: NM_005375.1 /DEF = Homo | MYB | 1.4 | −1.1 | −1.4 |
| | | sapiens v-myb avian | | | | |
| | | myeloblastosis viral oncogene | | | | |
| | | homolog (MYB), mRNA. | | | | |
| | | /FEA = mRNA /GEN = MYB | | | | |
| | | /PROD = v-myb avian | | | | |
| | | myeloblastosis viral | | | | |
| | | oncogenehomolog | | | | |
| | | /DB_XREF = gi: 4885496 | | | | |
| | | /UG = Hs.1334 v-myb avian | | | | |
| | | myeloblastosis viral oncogene | | | | |
| | | homolog /FL = gb: M15024.1 | | | | |
| | | gb: AF104863.1 gb: NM_005375.1 | | | | |
| 204962_s_at | centromere protein A, | gb: NM_001809.2 /DEF = Homo | CENPA | −1.0 | −1.0 | −52.3 |
| | | sapiens centromere protein A | | | | |
| | | (17 kD) (CENPA), mRNA. | | | | |
| | | /FEA = mRNA /GEN = CENPA | | | | |
| | | /PROD = centromere protein A | | | | |
| | | /DB_XREF = gi: 4585861 | | | | |
| | | /UG = Hs.1594 centromere protein | | | | |
| | | A (17 kD) /FL = gb: NM_001809.2 | | | | |
| | | gb: U14518.1 | | | | |
| 203923_s_at | cytochrome b-245, bet [symbol] | gb: NM_000397.2 /DEF = Homo | CYBB | 1.1 | −1.2 | −1.3 |
| | | sapiens cytochrome b-245, beta | | | | |
| | | polypeptide (chronic | | | | |
| | | granulomatous disease) (CYBB), | | | | |
| | | mRNA. /FEA = mRNA | | | | |
| | | /GEN = CYBB /PROD = cytochrome | | | | |
| | | b-245, beta polypeptide | | | | |
| | | (chronicgranulomatous disease) | | | | |
| | | /DB_XREF = gi: 6996020 | | | | |
| | | /UG = Hs.88974 cytochrome b-245, | | | | |
| | | beta polypeptide (chronic | | | | |
| | | granulomatous disease) | | | | |
| | | /FL = gb: NM_000397.2 | | | | |
| 218039_at | nucleolar and spindle [symbol] | gb: NM_016359.1 /DEF = Homo | NUSAP1 | 1.2 | −1.2 | −1.4 |
| | | sapiens clone HQ0310 | | | | |
| | | PRO0310p1 (LOC51203), mRNA. | | | | |
| | | /FEA = mRNA /GEN = LOC51203 | | | | |
| | | /PROD = clone HQ0310 | | | | |
| | | PRO0310p1 | | | | |
| | | /DB_XREF = gi: 7705950 | | | | |
| | | /UG = Hs.279905 clone HQ0310 | | | | |
| | | PRO0310p1 /FL = gb: AF305711.1 | | | | |
| | | gb: BC001308.1 gb: AF290612.1 | | | | |
| | | gb: AF090915.1 gb: NM_016359.1 | | | | |
| 206461_x_at | metallothionein 1H | gb: NM_005951.1 /DEF = Homo | MT1H | 1.2 | −1.9 | −1.2 |
| | | sapiens metallothionein 1H | | | | |
| | | (MT1H), mRNA. /FEA = mRNA | | | | |
| | | /GEN = MT1H | | | | |
| | | /PROD = metallothionein 1H | | | | |
| | | /DB_XREF = gi: 10835084 | | | | |
| | | /UG = Hs.2667 metallothionein 1H | | | | |
| | | /FL = gb: NM_005951.1 | | | | |
| 203535_at | S100 calcium binding [symbol] | gb: NM_002965.2 /DEF = Homo | S100A9 | −1.1 | −1.4 | −1.5 |
| | | sapiens S100 calcium-binding | | | | |
| | | protein A9 (calgranulin B) | | | | |
| | | (S100A9), mRNA. /FEA = mRNA | | | | |
| | | /GEN = S100A9 /PROD = S100 calcium-binding protein A9 | | | | |
| | | /DB_XREF = gi: 9845520 | | | | |
| | | /UG = Hs.112405 S100 calcium- | | | | |
| | | binding protein A9 (calgranulin B) | | | | |
| | | /FL = gb: M26311.1 | | | | |
| | | gb: NM_002965.2 | | | | |
| 218355_at | kinesin family | gb: NM_012310.2 /DEF = Homo sapiens kinesin | KIF4A | −1.0 | −1.0 | −1.0 |
| | member 4A | family member 4A (KIF4A), mRNA. /FEA = mRNA | | | | |
| | | /GEN = KIF4A /PROD = kinesin family member 4 | | | | |
| | | /DB_XREF = gi: 7305204 /UG = Hs.279766 kinesin | | | | |
| | | family member 4A /FL = gb: AF179308.1 | | | | |
| | | gb: AF071592.2 gb: NM_012310.2 | | | | |
| 216950_s_at | Fc fragment of | Consensus includes gb: X14355.1 /DEF = Human | FCGR1A | 1.0 | −1.1 | −1.2 |
| | IgG, high affinity | mRNA for high affinity Fc receptor (FcRI) b form. | | | | |
| | Ia, receptor for | /FEA = mRNA /DB_XREF = gi: 31333 | | | | |
| | (CD64) | /UG = Hs.77424 Fc fragment of IgG, high affinity | | | | |
| | | Ia, receptor for (CD64) | | | | |
| 202191_s_at | growth arrest- | Consensus includes gb: BE439987 /FEA = EST | GAS7 | 1.2 | −1.4 | −1.1 |
| | specific 7 | /DB_XREF = gi: 9439470 /DB_XREF = est: HTM1- | | | | |
| | | 745F /UG = Hs.226133 growth arrest-specific 7 | | | | |
| | | /FL = gb: AB007854.1 gb: NM_005890.1 | | | | |
| 205769_at | solute carrier | gb: NM_003645.1 /DEF = Homo sapiens fatty-acid- | SLC27A2 | −1.0 | −1.0 | −1.0 |
| | family 27 (fatty | Coenzyme A ligase, very long-chain 1 (FACVL1), | | | | |
| | acid transporter), | mRNA. /FEA = mRNA /GEN = FACVL1 | | | | |
| | member 2 | /PROD = very long-chain fatty-acid-Coenzyme A | | | | |
| | | ligase 1 /DB_XREF = gi: 4503652 /UG = Hs.11729 | | | | |
| | | fatty-acid-Coenzyme A ligase, very long-chain 1 | | | | |
| | | /FL = gb: D88308.1 gb: AF096290.1 | | | | |
| | | gb: NM_003645.1 | | | | |
| 209714_s_at | cyclin-dependent | gb: AF213033.1 /DEF = Homo sapiens isolate BX- | CDKN3 | −1.3 | −1.0 | −1.2 |
| | kinase inhibitor 3 | 01 cyclin-dependent kinase associated protein | | | | |
| | (CDK2- | phosphatase mRNA, complete cds. | | | | |
| | associated dual | /FEA = mRNA /PROD = cyclin-dependent kinase | | | | |
| | specificity | associated proteinphosphatase | | | | |
| | phosphatase) | /DB_XREF = gi: 12734643 /UG = Hs.84113 cyclin- | | | | |
| | | dependent kinase inhibitor 3 (CDK2-associated | | | | |
| | | dual specificity phosphatase) | | | | |
| | | /FL = gb: AF213033.1 gb: AF213034.1 | | | | |
| | | gb: AF213035.1 gb: AF213036.1 gb: AF213037.1 | | | | |
| | | gb: AF213038.1 gb: AF213039.1 gb: AF213040.1 | | | | |
| | | gb: AF213041.1 gb: AF213042.1 gb: AF213044.1 | | | | |
| | | gb: AF213046.1 gb: AF213047.1 gb: AF213048.1 | | | | |
| | | gb: AF213049.1 gb: AF213050.1 gb: AF213051.1 | | | | |
| | | gb: AF213052.1 gb: AF213053.1 gb: U02681.1 | | | | |
| | | gb: L25876.1 gb: NM_005192.1 gb: L27711.1 | | | | |
| 203145_at | sperm associated | gb: NM_006461.1 /DEF = Homo sapiens mitotic | SPAG5 | 1.1 | 1.3 | 94.7 |
| | antigen 5 | spindle coiled-coil related protein (DEEPEST), | | | | |
| | | mRNA. /FEA = mRNA /GEN = DEEPEST | | | | |
| | | /PROD = mitotic spindle coiled-coil related protein | | | | |
| | | /DB_XREF = gi: 5453631 /UG = Hs.16244 mitotic | | | | |
| | | spindle coiled-coil related protein | | | | |
| | | /FL = gb: BC000322.1 gb: AF063308.1 | | | | |
| | | gb: NM_006461.1 | | | | |
| 205119_s_at | formyl peptide | gb: NM_002029.1 /DEF = Homo sapiens formyl | | 1.3 | −1.0 | −1.4 |
| | receptor 1 | peptide receptor 1 (FPR1), mRNA. /FEA = mRNA | | | | |
| | | /GEN = FPR1 /PROD = formyl peptide receptor 1 | | | | |
| | | /DB_XREF = gi: 4503778 /UG = Hs.753 formyl | | | | |
| | | peptide receptor 1 /FL = gb: BC005315.1 | | | | |
| | | gb: M60626.1 gb: M60627.1 gb: NM_002029.1 | | | | |
| 204759_at | chromosome | gb: NM_001268.1 /DEF = Homo sapiens | CHC1L | 1.6 | −1.0 | 1.2 |
| | condensation 1- | chromosome condensation 1-like (CHC1L), | | | | |
| | like | mRNA. /FEA = mRNA /GEN = CHC1L | | | | |
| | | /PROD = RCC1-like G exchanging factor RLG | | | | |
| | | /DB_XREF = gi: 4557444 /UG = Hs.27007 | | | | |
| | | chromosome condensation 1-like | | | | |
| | | /FL = gb: AF060219.1 gb: NM_001268.1 | | | | |
| 201666_at | tissue inhibitor of | gb: NM_003254.1 /DEF = Homo sapiens tissue | TIMP1 | 1.0 | −1.3 | 1.0 |
| | metalloproteinase | inhibitor of metalloproteinase 1 (erythroid | | | | |
| | 1 (erythroid | potentiating activity, collagenase inhibitor) | | | | |
| | potentiating | (TIMP1), mRNA. /FEA = mRNA /GEN = TIMP1 | | | | |
| | activity, | /PROD = tissue inhibitor of metalloproteinase | | | | |
| | collagenase | 1 precursor /DB_XREF = gi: 4507508 /UG = Hs.5831 tissue inhibitor of | | | | |
| | inhibitor) | metalloproteinase 1 (erythroid | | | | |
| | | potentiating activity, collagenase inhibitor) | | | | |
| | | /FL = gb: BC000866.1 gb: M12670.1 gb: M59906.1 | | | | |
| | | gb: NM_003254.1 | | | | |
| 217996_at | pleckstrin | Consensus includes gb: AA576961 /FEA = EST | PHLDA1 | 1.2 | 63.7 | −66.0 |
| | homology-like | /DB_XREF = gi: 2354435 | | | | |
| | domain, family A, | /DB_XREF = est: nm82d08.s1 | | | | |
| | member 1 | /CLONE = IMAGE: 1074735 /UG = Hs.82101 | | | | |
| | | pleckstrin homology-like domain, family A, | | | | |
| | | member 1 /FL = gb: NM_007350.1 | | | | |
| 202388_at | regulator of G- | gb: NM_002923.1 /DEF = Homo sapiens regulator | RGS2 | 1.4 | 1.2 | 1.3 |
| | protein signalling | of G-protein signalling 2, 24 kD (RGS2), mRNA. | | | | |
| | 2, 24 kDa | /FEA = mRNA /GEN = RGS2 /PROD = regulator of | | | | |
| | | G-protein signalling 2, 24 kD | | | | |
| | | /DB_XREF = gi: 4506516 /UG = Hs.78944 regulator | | | | |
| | | of G-protein signalling 2, 24 kD /FL = gb: L13463.1 | | | | |
| | | gb: NM_002923.1 | | | | |
| 204446_s_at | arachidonate 5- | gb: NM_000698.1 /DEF = Homo sapiens | ALOX5 | 1.2 | −1.3 | −1.3 |
| | lipoxygenase | arachidonate 5-lipoxygenase (ALOX5), mRNA. | | | | |
| | | /FEA = mRNA /GEN = ALOX5 | | | | |
| | | /PROD = arachidonate 5-lipoxygenase | | | | |
| | | /DB_XREF = gi: 4502056 /UG = Hs.89499 | | | | |
| | | arachidonate 5-lipoxygenase /FL = gb: J03600.1 | | | | |
| | | gb: J03571.1 gb: NM_000698.1 | | | | |
| 203126_at | inositol(myo)-1(or | gb: NM_014214.1 /DEF = Homo sapiens | IMPA2 | −1.0 | −1.7 | 1.0 |
| | 4)- | inositol(myo)-1(or 4)-monophosphatase 2 | | | | |
| | monophosphatase 2 | (IMPA2), mRNA. /FEA = mRNA /GEN = IMPA2 | | | | |
| | | /PROD = inositol(myo)-1(or 4)-monophosphatase | | | | |
| | | 2 /DB_XREF = gi: 7657235 /UG = Hs.5753 | | | | |
| | | inositol(myo)-1(or 4)-monophosphatase 2 | | | | |
| | | /FL = gb: AF200432.1 gb: NM_014214.1 | | | | |
| | | gb: AF014398.2 | | | | |
| 208581_x_at | metallothionein | gb: NM_005952.1 /DEF = Homo sapiens | MT1X | 1.2 | −1.4 | −1.5 |
| | 1X | metallothionein 1X (MT1X), mRNA. /FEA = CDS | | | | |
| | | /GEN = MT1X /PROD = metallothionein 1X | | | | |
| | | /DB_XREF = gi: 10835231 /UG = Hs.278462 | | | | |
| | | metallothionein 1X /FL = gb: NM_005952.1 | | | | |
| 219890_at | C-type (calcium | gb: NM_013252.1 /DEF = Homo sapiens C-type | CLECSF5 | 1.5 | −1.0 | −1.2 |
| | dependent, | (calcium dependent, carbohydrate-recognition | | | | |
| | carbohydrate- | domain) lectin, superfamily member 5 | | | | |
| | recognition | (CLECSF5), mRNA. /FEA = mRNA | | | | |
| | domain) lectin, | /GEN = CLECSF5 /PROD = C-type (calcium | | | | |
| | superfamily | dependent, carbohydrate-recognition domain) | | | | |
| | member 5 | lectin, superfamilymember 5 | | | | |
| | | /DB_XREF = gi: 10281668 /UG = Hs.126355 C-type | | | | |
| | | (calcium dependent, carbohydrate-recognition | | | | |
| | | domain) lectin, superfamily member 5 | | | | |
| | | /FL = gb: NM_013252.1 gb: AF139768.1 | | | | |
| 209773_s_at | ribonucleotide | gb: BC001886.1 /DEF = Homo sapiens, | RRM2 | −1.9 | −1.5 | −1.5 |
| | reductase M2 | ribonucleotide reductase M2 polypeptide, clone | | | | |
| | polypeptide | MGC: 1551, mRNA, complete cds. /FEA = mRNA | | | | |
| | | /PROD = ribonucleotide reductase M2 polypeptide | | | | |
| | | /DB_XREF = gi: 12804874 /UG = Hs.75319 | | | | |
| | | ribonucleotide reductase M2 polypeptide | | | | |
| | | /FL = gb: BC001886.1 | | | | |
| 205098_at | chemokine (C-C | Consensus includes gb: AI421071 /FEA = EST | | −1.1 | −1.7 | −1.1 |
| | motif) receptor 1 | /DB_XREF = gi: 4267002 | | | | |
| | | /DB_XREF = est: tf24a02.x1 | | | | |
| | | /CLONE = IMAGE: 2097098 /UG = Hs.301921 | | | | |
| | | chemokine (C-C motif) receptor 1 | | | | |
| | | /FL = gb: L09230.1 gb: L10918.1 gb: NM_001295.1 | | | | |
| 201438_at | collagen, type VI, | gb: NM_004369.1 /DEF = Homo sapiens collagen, | COL6A3 | −1.0 | −1.0 | −1.0 |
| | alpha 3 | type VI, alpha 3 (COL6A3), mRNA. /FEA = mRNA | | | | |
| | | /GEN = COL6A3 /PROD = collagen, type VI, alpha | | | | |
| | | 3 /DB_XREF = gi: 4758027 /UG = Hs.80988 | | | | |
| | | collagen, type VI, alpha 3 /FL = gb: NM_004369.1 | | | | |
| 207067_s_at | histidine | gb: NM_002112.1 /DEF = Homo sapiens histidine | HDC | −1.3 | −1.0 | −1.2 |
| | decarboxylase | decarboxylase (HDC), mRNA. /FEA = mRNA | | | | |
| | | /GEN = HDC /PROD = histidine decarboxylase | | | | |
| | | /DB_XREF = gi: 4504364 /UG = Hs.1481 histidine | | | | |
| | | decarboxylase /FL = gb: M60445.1 | | | | |
| | | gb: NM_002112.1 | | | | |
| 204614_at | serine (or | gb: NM_002575.1 /DEF = Homo sapiens serine (or | SERPINB2 | 1.4 | 1.2 | 1.3 |
| | cysteine) | cysteine) proteinase inhibitor, clade B | | | | |
| | proteinase | (ovalbumin), member 2 (SERPINB2), mRNA. | | | | |
| | inhibitor, clade B | /FEA = mRNA /GEN = SERPINB2 /PROD = serine | | | | |
| | (ovalbumin), | (or cysteine) proteinase inhibitor, cladeB | | | | |
| | member 2 | (ovalbumin), member 2 /DB_XREF = gi: 4505594 | | | | |
| | | /UG = Hs.75716 serine (or cysteine) proteinase | | | | |
| | | inhibitor, clade B (ovalbumin), member 2 | | | | |
| | | /FL = gb: J02685.1 gb: J03603.1 gb: M18082.1 | | | | |
| | | gb: NM_002575.1 | | | | |
| 205786_s_at | integrin, alpha M | gb: NM_000632.2 /DEF = Homo sapiens integrin, | ITGAM | 1.0 | −1.2 | −1.6 |
| | (complement | alpha M (complement component receptor 3, | | | | |
| | component | alpha; also known as CD11b (p170), | | | | |
| | receptor 3, alpha; | macrophage antigen alpha polypeptide) | | | | |
| | also known as | (ITGAM), mRNA. /FEA = mRNA /GEN = ITGAM | | | | |
| | CD11b (p170), | /PROD = integrin alpha M precursor | | | | |
| | macrophage | /DB_XREF = gi: 6006013 /UG = Hs.172631 integrin, | | | | |
| | antigen alpha | alpha M (complement component receptor 3, | | | | |
| | polypeptide) | alpha; also known as CD11b (p170), | | | | |
| | | macrophage antigen alpha polypeptide) | | | | |
| | | /FL = gb: J03925.1 gb: NM_000632.2 | | | | |
| 201739_at | serum/glucocorticoid | gb: NM_005627.1 /DEF = Homo sapiens | SGK | 1.3 | 1.0 | 1.0 |
| | regulated | serumglucocorticoid regulated kinase (SGK), | | | | |
| | kinase | mRNA. /FEA = mRNA /GEN = SGK | | | | |
| | | /PROD = serumglucocorticoid regulated kinase | | | | |
| | | /DB_XREF = gi: 5032090 /UG = Hs.296323 | | | | |
| | | serumglucocorticoid regulated kinase | | | | |
| | | /FL = gb: BC001263.1 gb: NM_005627.1 | | | | |
| | | gb: AF153609.1 | | | | |
| 209949_at | neutrophil | gb: BC001606.1 /DEF = Homo sapiens, Similar to | NCF2 | 1.2 | −1.4 | −1.5 |
| | cytosolic factor 2 | neutrophil cytosolic factor 2 (65 kD, chronic | | | | |
| | (65 kDa, chronic | granulomatous disease, autosomal 2), clone | | | | |
| | granulomatous | MGC: 2275, mRNA, complete cds. /FEA = mRNA | | | | |
| | disease, | /PROD = Similar to neutrophil cytosolic factor 2 | | | | |
| | autosomal 2) | (65 kD, chronic granulomatous disease, | | | | |
| | | autosomal 2) /DB_XREF = gi: 12804408 | | | | |
| | | /UG = Hs.949 neutrophil cytosolic factor 2 (65 kD, | | | | |
| | | chronic granulomatous disease, autosomal 2) | | | | |
| | | /FL = gb: BC001606.1 gb: M32011.1 | | | | |
| | | gb: NM_000433.1 | | | | |
| 221210_s_at | N- | gb: NM_030769.1 /DEF = Homo sapiens | NPL | 1.5 | −1.1 | 1.1 |
| | acetylneuraminate | hypothetical protein similar to swine | | | | |
| | pyruvate lyase | acylneuraminate lyase (C1ORF13), mRNA. | | | | |
| | (dihydrodipicolinate | /FEA = mRNA /GEN = C1ORF13 | | | | |
| | synthase) | /PROD = hypothetical protein similar to | | | | |
| | | swineacylneuraminate lyase | | | | |
| | | /DB_XREF = gi: 13540532 /FL = gb: NM_030769.1 | | | | |
| 210184_at | integrin, alpha X | gb: M81695.1 /DEF = H. sapiens leukocyte | ITGAX | 1.1 | −1.0 | −1.2 |
| | (antigen CD11C | adhesion glycoprotein p150, 95 mRNA, complete | | | | |
| | (p150), alpha | cds. /FEA = mRNA /GEN = ITGAX | | | | |
| | polypeptide) | /DB_XREF = gi: 487829 /UG = Hs.51077 integrin, | | | | |
| | | alpha X (antigen CD11C (p150), alpha polypeptide) /FL = gb: M81695.1 | | | | |
| | | gb: NM_000887.2 | | | | |
| 217762_s_at | RAB31, member | Consensus includes gb: BE789881 /FEA = EST | RAB31 | 1.3 | −1.3 | −1.1 |
| | RAS oncogene | /DB_XREF = gi: 10211079 | | | | |
| | family | /DB_XREF = est: 601476750F1 | | | | |
| | | /CLONE = IMAGE: 3879493 /UG = Hs.223025 | | | | |
| | | RAB31, member RAS oncogene family | | | | |
| | | /FL = gb: AF234995.1 gb: BC001148.1 | | | | |
| | | gb: U59877.1 gb: U57091.1 gb: NM_006868.1 | | | | |
| | | gb: AF183421.1 | | | | |
| 215925_s_at | CD72 antigen | Consensus includes gb: AF283777.2 | CD72 | 69.7 | −1.4 | 1.4 |
| | | /DEF = Homo sapiens clone TCBAP0702 mRNA | | | | |
| | | sequence. /FEA = mRNA | | | | |
| | | /DB_XREF = gi: 10281735 /UG = Hs.116481 CD72 | | | | |
| | | antigen | | | | |
| 201422_at | interferon, | gb: NM_006332.1 /DEF = Homo sapiens | IFI30 | −1.4 | −1.1 | −1.1 |
| | gamma-inducible | interferon, gamma-inducible protein 30 (IFI30), | | | | |
| | protein 30 | mRNA. /FEA = mRNA /GEN = IFI30 | | | | |
| | | /PROD = interferon, gamma-inducible protein 30 | | | | |
| | | /DB_XREF = gi: 5453695 /UG = Hs.14623 | | | | |
| | | interferon, gamma-inducible protein 30 | | | | |
| | | /FL = gb: J03909.1 gb: NM_006332.1 | | | | |
| | | gb: AF097362.1 | | | | |
| 218559_s_at | v-maf | gb: NM_005461.1 /DEF = Homo sapiens Kreisler | MAFB | 1.1 | −1.5 | 1.1 |
| | musculoaponeurotic | (mouse) maf-related leucine zipper homolog | | | | |
| | fibrosarcoma | (KRML), mRNA. /FEA = mRNA /GEN = KRML | | | | |
| | oncogene | /PROD = Kreisler (mouse) maf-related leucine | | | | |
| | homolog B | zipperhomolog /DB_XREF = gi: 4885446 | | | | |
| | (avian) | /UG = Hs.169487 Kreisler (mouse) maf-related | | | | |
| | | leucine zipper homolog /FL = gb: AF134157.1 gb: NM_005461.1 | | | | |
| 202241_at | tribbles homolog | gb: NM_025195.1 /DEF = Homo sapiens | TRIB1 | 1.4 | −1.3 | 1.1 |
| | 1 (Drosophila) | phosphoprotein regulated by mitogenic pathways | | | | |
| | | (C8FW), mRNA. /FEA = mRNA /GEN = C8FW | | | | |
| | | /PROD = G-protein-coupled receptor induced | | | | |
| | | protein /DB_XREF = gi: 13399327 /UG = Hs.7837 | | | | |
| | | phosphoprotein regulated by mitogenic pathways | | | | |
| | | /FL = gb: AF205437.1 gb: NM_025195.1 | | | | |
| 204798_at | v-myb | gb: NM_005375.1 /DEF = Homo sapiens v-myb | MYB | 1.4 | −1.1 | −1.4 |
| | myeloblastosis | avian myeloblastosis viral oncogene homolog | | | | |
| | viral oncogene | (MYB), mRNA. /FEA = mRNA /GEN = MYB | | | | |
| | homolog (avian) | /PROD = v-myb avian myeloblastosis viral | | | | |
| | | oncogenehomolog /DB_XREF = gi: 4885496 | | | | |
| | | /UG = Hs.1334 v-myb avian myeloblastosis viral | | | | |
| | | oncogene homolog /FL = gb: M15024.1 | | | | |
| | | gb: AF104863.1 gb: NM_005375.1 | | | | |
| 203923_s_at | cytochrome b- | gb: NM_000397.2 /DEF = Homo sapiens | CYBB | 1.1 | −1.2 | −1.3 |
| | 245, beta | cytochrome b-245, beta polypeptide (chronic | | | | |
| | polypeptide | granulomatous disease) (CYBB), mRNA. | | | | |
| | (chronic | /FEA = mRNA /GEN = CYBB /PROD = cytochrome | | | | |
| | granulomatous | b-245, beta polypeptide (chronicgranulomatous | | | | |
| | disease) | disease) /DB_XREF = gi: 6996020 /UG = Hs.88974 | | | | |
| | | cytochrome b-245, beta polypeptide (chronic | | | | |
| | | granulomatous disease) /FL = gb: NM_000397.2 | | | | |
| 218039_at | nucleolar and | gb: NM_016359.1 /DEF = Homo sapiens clone | NUSAP1 | 1.2 | −1.2 | −1.4 |
| | spindle | HQ0310 PRO0310p1 (LOC51203), mRNA. | | | | |
| | associated | /FEA = mRNA /GEN = LOC51203 /PROD = clone | | | | |
| | protein 1 | HQ0310 PRO0310p1 /DB_XREF = gi: 7705950 | | | | |
| | | /UG = Hs.279905 clone HQ0310 PRO0310p1 | | | | |
| | | /FL = gb: AF305711.1 gb: BC001308.1 | | | | |
| | | gb: AF290612.1 gb: AF090915.1 | | | | |
| | | gb: NM_016359.1 | | | | |
| 206461_x_at | metallothionein | gb: NM_005951.1 /DEF = Homo sapiens | MT1H | 1.2 | −1.9 | −1.2 |
| | 1H | metallothionein 1H (MT1H), mRNA. /FEA = mRNA | | | | |
| | | /GEN = MT1H /PROD = metallothionein 1H | | | | |
| | | /DB_XREF = gi: 10835084 /UG = Hs.2667 | | | | |
| | | metallothionein 1H /FL = gb: NM_005951.1 | | | | |
| 203535_at | S100 calcium | gb: NM_002965.2 /DEF = Homo sapiens S100 | S100A9 | −1.1 | −1.4 | −1.5 |
| | binding protein A9 | calcium-binding protein A9 (calgranulin B) | | | | |
| | (calgranulin B) | (S100A9), mRNA. /FEA = mRNA /GEN = S100A9 | | | | |
| | | /PROD = S100 calcium-binding protein A9 | | | | |
| | | /DB_XREF = gi: 9845520 /UG = Hs.112405 S100 | | | | |
| | | calcium-binding protein A9 (calgranulin B) | | | | |
| | | /FL = gb: M26311.1 gb: NM_002965.2 | | | | |
| 204415_at | interferon, alpha- | gb: NM_022873.1 /DEF = Homo sapiens | G1P3 | −1.1 | −3.5 | 1.4 |
| | inducible protein | interferon, alpha-inducible protein (clone IFI-6- | | | | |
| | (clone IFI-6-16) | 16) (G1P3), transcript variant 3, mRNA. | | | | |
| | | /FEA = mRNA /GEN = G1P3 /PROD = interferon | | | | |
| | | induced 6-16 protein, isoform c | | | | |
| | | /DB_XREF = gi: 13259549 /UG = Hs.265827 | | | | |
| | | interferon, alpha-inducible protein (clone IFI-6- | | | | |
| | | 16) /FL = gb: NM_022872.1 gb: NM_022873.1 | | | | |
| | | gb: NM_002038.2 | | | | |
| 205483_s_at | interferon, alpha- | gb: NM_005101.1 /DEF = Homo sapiens | G1P2 | 1.0 | −9.9 | −1.1 |
| | inducible protein | interferon-stimulated protein, 15 kDa (ISG15), | | | | |
| | (clone IFI-15K) | mRNA. /FEA = mRNA /GEN = ISG15 | | | | |
| | | /PROD = interferon-stimulated protein, 15 kDa | | | | |
| | | /DB_XREF = gi: 4826773 /UG = Hs.833 interferon-stimulated protein, | | | | |
| | | 15 kDa /FL = gb: M13755.1 | | | | |
| | | gb: NM_005101.1 | | | | |
| 203595_s_at | interferon-induced | Consensus includes gb: N47725 /FEA = EST | IFIT5 | 1.5 | −2.2 | 1.0 |
| | protein with | /DB_XREF = gi: 1188891 | | | | |
| | tetratricopeptide | /DB_XREF = est: yy92h11.s1 | | | | |
| | repeats 5 | /CLONE = IMAGE: 281061 /UG = Hs.27610 | | | | |
| | | retinoic acid- and interferon-inducible protein | | | | |
| | | (58 kD) /FL = gb: U34605.1 gb: NM_012420.1 | | | | |
| 203153_at | interferon-induced | gb: NM_001548.1 /DEF = Homo sapiens | | −1.0 | −1084.5 | −1.0 |
| | protein with | interferon-induced protein with tetratricopeptide | | | | |
| | tetratricopeptide | repeats 1 (IFIT1), mRNA. /FEA = mRNA | | | | |
| | repeats 1 | /GEN = IFIT1 /PROD = interferon-induced protein | | | | |
| | | withtetratricopeptide repeats 1 | | | | |
| | | /DB_XREF = gi: 4504584 /UG = Hs.20315 | | | | |
| | | interferon-induced protein with tetratricopeptide | | | | |
| | | repeats 1 /FL = gb: M24594.1 gb: NM_001548.1 | | | | |
| 214453_s_at | interferon-induced | Consensus includes gb: NM_006417.1 | IFI44 | 1.4 | −4.9 | 1.1 |
| | protein 44 | /DEF = Homo sapiens interferon-induced, | | | | |
| | | hepatitis C-associated microtubular aggregate | | | | |
| | | protein (44 kD) (MTAP44), mRNA. /FEA = CDS | | | | |
| | | /GEN = MTAP44 /PROD = interferon-induced, | | | | |
| | | hepatitis C-associatedmicrotubular aggregate | | | | |
| | | protein (44 kD) /DB_XREF = gi: 5453743 | | | | |
| | | /UG = Hs.82316 interferon-induced, hepatitis C- | | | | |
| | | associated microtubular aggregate protein | | | | |
| | | (44 kD) /FL = gb: NM_006417.1 | | | | |
| 202086_at | myxovirus (influenza | gb: NM_002462.1 /DEF = Homo sapiens | MX1 | 1.1 | −7.3 | −1.2 |
| | virus) resistance 1, | myxovirus (influenza) resistance 1, homolog of | | | | |
| | interferon-inducible | murine (interferon-inducible protein p78) (MX1), | | | | |
| | protein p78 (mouse) | mRNA. /FEA = mRNA /GEN = MX1 | | | | |
| | | /PROD = myxovirus (influenza) resistance 1, | | | | |
| | | homolog ofmurine (interferon-inducible protein | | | | |
| | | p78) /DB_XREF = gi: 4505290 /UG = Hs.76391 | | | | |
| | | myxovirus (influenza) resistance 1, homolog of | | | | |
| | | murine (interferon-inducible protein p78) | | | | |
| | | /FL = gb: M30817.1 gb: M33882.1 | | | | |
| | | gb: NM_002462.1 | | | | |
| 216598_s_at | chemokine (C-C | Consensus includes gb: S69738.1 /DEF = MCP- | CCL2 | −1.3 | −3.1 | −2.4 |
| | motif) ligand 2 | 1 = monocyte chemotactic protein human, aortic | | | | |
| | | endothelial cells, mRNA, 661 nt. /FEA = mRNA | | | | |
| | | /GEN = MCP-1 /PROD = MCP-1 | | | | |
| | | /DB_XREF = gi: 545464 /UG = Hs.303649 small | | | | |
| | | inducible cytokine A2 (monocyte chemotactic | | | | |
| | | protein 1, homologous to mouse Sig-je) | | | | |
| 204533_at | chemokine (C—X—C | gb: NM_001565.1 /DEF = Homo sapiens small | CXCL10 | −1.2 | −4.9 | −3.9 |
| | motif) ligand 10 | inducible cytokine subfamily B (Cys-X-Cys), | | | | |
| | | member 10 (SCYB10), mRNA. /FEA = mRNA | | | | |
| | | /GEN = SCYB10 /PROD = interferon gamma- | | | | |
| | | induced precursor /DB_XREF = gi: 4504700 | | | | |
| | | /UG = Hs.2248 small inducible cytokine | | | | |
| | | subfamily B (Cys-X-Cys), member 10 | | | | |
| | | /FL = gb: NM_001565.1 | | | | |
| 203915_at | chemokine (C—X—C | gb: NM_002416.1 /DEF = Homo sapiens | CXCL9 | −1.2 | −1.7 | −3.2 |
| | motif) ligand 9 | monokine induced by gamma interferon (MIG), | | | | |
| | | mRNA. /FEA = mRNA /GEN = MIG | | | | |
| | | /PROD = monokine induced by gamma | | | | |
| | | interferon /DB_XREF = gi: 4505186 | | | | |
| | | /UG = Hs.77367 monokine induced by gamma | | | | |
| | | interferon /FL = gb: NM_002416.1 | | | | |
| 209714_s_at | cyclin-dependent | gb: AF213033.1 /DEF = Homo sapiens isolate | CDKN3 | −1.3 | −1.0 | −1.2 |
| | kinase inhibitor 3 | BX-01 cyclin-dependent kinase associated | | | | |
| | (CDK2-associated | protein phosphatase mRNA, complete cds. | | | | |
| | dual specificity | /FEA = mRNA /PROD = cyclin-dependent kinase | | | | |
| | phosphatase) | associated proteinphosphatase | | | | |
| | | /DB_XREF = gi: 12734643 /UG = Hs.84113 | | | | |
| | | cyclin-dependent kinase inhibitor 3 (CDK2- | | | | |
| | | associated dual specificity phosphatase) | | | | |
| | | /FL = gb: AF213033.1 gb: AF213034.1 | | | | |
| | | gb: AF213035.1 gb: AF213036.1 | | | | |
| | | gb: AF213037.1 gb: AF213038.1 | | | | |
| | | gb: AF213039.1 gb: AF213040.1 | | | | |
| | | gb: AF213041.1 gb: AF213042.1 | | | | |
| | | gb: AF213044.1 gb: AF213046.1 | | | | |
| | | gb: AF213047.1 gb: AF213048.1 | | | | |
| | | gb: AF213049.1 gb: AF213050.1 | | | | |
| | | gb: AF213051.1 gb: AF213052.1 | | | | |
| | | gb: AF213053.1 gb: U02681.1 gb: L25876.1 | | | | |
| | | gb: NM_005192.1 gb: L27711.1 | | | | |
| 204170_s_at | CDC28 protein | gb: NM_001827.1 /DEF = Homo sapiens | CKS2 | −1.1 | −1.7 | −1.9 |
| | kinase regulatory | CDC28 protein kinase 2 (CKS2), mRNA. | | | | |
| | subunit 2 | /FEA = mRNA /GEN = CKS2 /PROD = CDC28 | | | | |
| | | protein kinase 2 /DB_XREF = gi: 4502858 | | | | |
| | | /UG = Hs.83758 CDC28 protein kinase 2 | | | | |
| | | /FL = gb: NM_001827.1 | | | | |
| 203213_at | cell division cycle | Consensus includes gb: AL524035 /FEA = EST | CDC2 | −1.0 | −1.0 | −1.0 |
| | 2, G1 to S and G2 | /DB_XREF = gi: 12787528 | | | | |
| | to M | /DB_XREF = est: AL524035 | | | | |
| | | /CLONE = CS0DC003YN06 (3 prime) | | | | |
| | | /UG = Hs.184572 cell division cycle 2, G1 to S | | | | |
| | | and G2 to M /FL = gb: NM_001786.1 | | | | |
| 201292_at | topoisomerase | Consensus includes gb: AL561834 /FEA = EST | TOP2A | −1.0 | −1.0 | −1.0 |
| | (DNA) II alpha | /DB_XREF = gi: 12909658 | | | | |
| | 170 kDa | /DB_XREF = est: AL561834 | | | | |
| | | /CLONE = CS0DB005YC15 (3 prime) | | | | |
| | | /UG = Hs.156346 topoisomerase (DNA) II | | | | |
| | | alpha (170 kD) /FL = gb: J04088.1 | | | | |
| | | gb: NM_001067.1 | | | | |

[symbol]

indicates data missing or illegible when filed

The application's sequence listing, which the Patent Office published only in electronic form, follows.

SEQUENCE LISTING (315 sequences)

SEQ ID NO: 1 - DNA, 3662 bp, Homo sapiens
  misc_feature: peroxisomal biogenesis factor 19
aggtagcaagatggccgccgctgaggaaggctgtagtgtcggggccgaagcggacagggaattggaggagcttctggaaagtgctcttgatgatttcgataaagccaaaccctccccagcacccccttctaccaccacggcccctgatgcttcggggccccagaagagatcgccaggagacactgccaaagatgccctcttcgcttcccaagagaagtttttccaggaactattcgacagtgaactggcttcccaagccactgcggagttcgagaaggcaatgaaggagttggctgaggaagaaccccacctggtggagcagttccaaaagctctcagaggctgcagggagagtgggcagtgatatgacctcccaacaagaattcacttcttgcctaaaggaaacactaagtggattagccaaaaatgccactgaccttcagaactccagcatgtcggaagaagagctgaccaaggccatggaggggctaggcatggacgaaggggatggggaagggaacatcctccccatcatgcagagtattatgcagaacctactctccaaggatgtgctgtacccatcactgaaggagatcacagaaaagtatccagaatggttgcagagtcatcgggaatctctacctccagagcagtttgaaaaatatcaggagcagcacagcgtcatgtgcaaaatatgtgagcagtttgaggcagagacccccacagacagtgaaaccactcaaaaggctcgttttgagatggtgctggatcttatgcagcagctacaagatttaggccatcctccaaaagagctggctggagagatgcctcctggcctcaactttgacctggatgccctcaatctttcgggcccaccaggtgccagtggtgaacagtgtctgatcatgtgaaacacaacacgttttcctctctgagtcccagctatggggaacatctggagtcagcagaaccattgggacctgaggcaggagtgtcacctgcgggagaagtctgcccgctgccctctgtcatcccattcaagattgtgccataccagctgaggtttttcctctgtctctctaggaatagggtctgtttcacaggccatttctgtgaaccctactccattgtggtttctgccactatcaaagttccagctacctgcaaggtgaaggaaggcatcccttttggggcatgcactttctttcctttctcaaaataatgttatatgtggccacactgatgttcacctttacgtccagggtctttgtgccttgtctctactccctctcttggatctggggaggaggggcagagacctgggactctgtatttctatagttctcctggcagagcctttgagaatggggagaaacagcctgggctggggctacaggtctgtcactatgctctcttgccttcagacagaccattctgaattctctaaagggaaagggcttttgcatctaatcacaatagagttgaaagagaggccttaggattctcctctctctaggtgctgagccctcacctccctgttccaggctgagaactcaaatggttaccctgcttcttcctacaatgctgtgtgatatgggtgaacccagcccctgaccttcctctatcccctgcccatcctcccttttacctcctctcttttttaaacacctgtttatcccaacctttttgagctcaagctgtgataaagaagggcccatcctatttcccctcatctagtccatttacgattctcactgactccccgtcttcctggcagacacaaataaacccagtgtcaggtctaggaaattaatggctattcttccccagatacattctggcttatttgagatacatgattctcttagaatcctgtcccttggttcaggaaagtagcttggaaaaggagtaggggtatagcttgggtcccttttcctgcaaggccccatggggcagaatataataaatattctgagtgaggagtgtggtctttttctgatcttcctcagcttccgtaagttgcagagtgaggtatattaggagactagttctacacaatattgtaatgctgggttccatcaacacccaccttccacaactcagtctgcacctcagttggcaaaggagactggatggccatctttcctcatgttcccttgagtatttcaatgtagaaagcccttcaagtggtattatattttaaccttttacattattgttattaatgttagtaatatattgttatgttttctaaattatttttctttaagctgacgtggctttttttctgtggctcccagtgggtctacggaccttggctgacatatgttggtaggtactctggtcagctcagctggctgtcctggttcactcagaagataagtctctccaaagcaaattcacatgcattatgagtcgctttgagcttctgacatgtcacttgccccgaggttaaaacttttcaccccttgaagaccttacatgttttatggtattggtgaggaaggaaatgttctcaaggtctcaggctatttgggaaattccaactcctataccttaccagagcatggaagagcccagatctgaatgtaaaacgtctctgttctgccagagatggaaaaaatacaggtatacttgtgatatagtcatggggcttcagtgtcactattttctccttaaagctccagccaaaaactggacaaggatagagaggaggagggaagaacaaaagagcccttctctatgaaccttgtgccttctgtcctaccagttttcttttacagattctcacttctgctagcctagccagggcttactccaggaatctaaatagatgccctagtccactttatctttgttcccaaggcactcatttttattttgattttgattgaatgtgagcaggttgacctcaggtcacactttgttccaaaaacttttggaattattccaggacttgtggtggagttatggtactctagggcagtctttctcaaactatgtatggtaaaggaccaggttttttgttttccagtccttcacttatcaatatgcattcctattgccgatgacaggtatggagttcacactgtgtgctgccgacccggcaagtttgacagcacccaaactggccagactgttctgtaggttaagtccattgatcatgtacttggatatcacagcaacattgaaatgctaaaaagtttttaaacactctcaatttctaattcaccatgtcacagactggtgaaaaaaaaaaaaaggtgttcactgaccagcacaagtctgcagatcatctttgagtagcactgttttggggccctcggtctctctgaagaccctagcagaactgatacctacctgtatctcttgttctctcctatttgagtttcacttccagagaacttgttcttcagcaagaatgtgtcactagtaaggacatctctagcatttctctagccttccttttctgctgctcaaaaataatcgttacaaagcttaggtttaagctgtatatgaaatatttatgcgactctcaaactttaaaggagttgctcctttgttccaaaattaaatgtgttagataaatttgtgattgtatgggtggcttcatgaattaagaattgaattaatacagactttttgataataaaaaaaaaaaaa

SEQ ID NO: 2 - DNA, 2787 bp, Homo sapiens
  misc_feature: myxovirus (influenza virus) resistance 1, interferon-inducible protein p78 (mouse)
agagcggaggccgcactccagcactgcgcagggaccgccttggaccgcagttgccggccaggaatcccagtgtcacggtggacacgcctccctcgcgcccttgccgcccacctgctcacccagctcaggggctttggaattctgtggccacactgcgaggagatcggttctgggtcggaggctacaggaagactcccactccctgaaatctggagtgaagaacgccgccatccagccaccattccaaggaggtgcaggagaacagctctgtgataccatttaacttgttgacattacttttatttgaaggaacgtatattagagcttactttgcaaagaaggaagatggttgtttccgaagtggacatcgcaaaagctgatccagctgctgcatcccaccctctattactgaatggagatgctactgtggcccagaaaaatccaggctcggtggctgagaacaacctgtgcagccagtatgaggagaaggtgcgcccctgcatcgacctcattgactccctgcgggctctaggtgtggagcaggacctggccctgccagccatcgccgtcatcggggaccagagctcgggcaagagctccgtgttggaggcactgtcaggagttgcccttcccagaggcagcgggatcgtgaccagatgcccgctggtgctgaaactgaagaaacttgtgaacgaagataagtggagaggcaaggtcagttaccaggactacgagattgagatttcggatgcttcagaggtagaaaaggaaattaataaagcccagaatgccatcgccggggaaggaatgggaatcagtcatgagctaatcaccctggagatcagctcccgagatgtcccggatctgactctaatagaccttcctggcataaccagagtggctgtgggcaatcagcctgctgacattgggtataagatcaagacactcatcaagaagtacatccagaggcaggagacaatcagcctggtggtggtccccagtaatgtggacatcgccaccacagaggctctcagcatggcccaggaggtggaccccgagggagacaggaccatcggaatcttgacgaagcctgatctggtggacaaaggaactgaagacaaggttgtggacgtggtgcggaacctcgtgttccacctgaagaagggttacatgattgtcaagtgccggggccagcaggagatccaggaccagctgagcctgtccgaagccctgcagagagagaagatcttctttgagaaccacccatatttcagggatctgctggaggaaggaaaggccacggttccctgcctggcagaaaaacttaccagcgagctcatcacacatatctgtaaatctctgcccctgttagaaaatcaaatcaaggagactcaccagagaataacagaggagctacaaaagtatggtgtcgacataccggaagacgaaaatgaaaaaatgttcttcctgatagataaaattaatgcctttaatcaggacatcactgctctcatgcaaggagaggaaactgtaggggaggaagacattcggctgtttaccagactccgacacgagttccacaaatggagtacaataattgaaaacaattttcaagaaggccataaaattttgagtagaaaaatccagaaatttgaaaatcagtatcgtggtagagagctgccaggctttgtgaattacaggacatttgagacaatcgtgaaacagcaaatcaaggcactggaagagccggctgtggatatgctacacaccgtgacggatatggtccggcttgctttcacagatgtttcgataaaaaattttgaagagttttttaacctccacagaaccgccaagtccaaaattgaagacattagagcagaacaagagagagaaggtgagaagctgatccgcctccacttccagatggaacagattgtctactgccaggaccaggtatacaggggtgcattgcagaaggtcagagagaaggagctggaagaagaaaagaagaagaaatcctgggattttggggctttccagtccagctcggcaacagactcttccatggaggagatctttcagcacctgatggcctatcaccaggaggccagcaagcgcatctccagccacatccctttgatcatccagttcttcatgctccagacgtacggccagcagcttcagaaggccatgctgcagctcctgcaggacaaggacacctacagctggctcctgaaggagcggagcgacaccagcgacaagcggaagttcctgaaggagcggcttgcacggctgacgcaggctcggcgccggcttgcccagttccccggttaaccacactctgtccagccccgtagacgtgcacgcacactgtctgcccccgttcccgggtagccactggactgacgacttgagtgctcagtagtcagactggatagtccgtctctgcttatccgttagccgtggtgatttagcaggaagctgtgagagcagtttggtttctagcatgaagacagagccccaccctcagatgcacatgagctggcgggattgaaggatgctgtcttcgtactgggaaagggattttcagccctcagaatcgctccaccttgcagctctccccttctctgtattcctagaaactgacacatgctgaacatcacagcttatttcctcatttttataatgtcccttcacaaacccagtgttttaggagcatgagtgccgtgtgtgtgcgtcctgcggagccctgtctcctctctctgtaataaactcatttctagcccg

SEQ ID NO: 3 - DNA, 597 bp, Homo sapiens
  misc_feature: interferon, alpha-inducible protein 27
agctgaagttgaggatctcttactctctaagccacggaattaacccgagcaggcatggaggcctctgctctcacctcatcagcagtgaccagtgtggccaaagtggtcagggtggcctctggctctgccgtagttttgcccctggccaggattgctacagttgtgattggaggagttgtggccatggcggctgtgcccatggtgctcagtgccatgggcttcactgcggcgggaatcgcctcgtcctccatagcagccaagatgatgtccgcggcggccattgccaatgggggtggagttgcctcgggcagccttgtgggtactctgcagtcactgggagcaactggactctccggattgaccaagttcatcctgggctccattgggtctgccattgcggctgtcattgcgaggttctactagctccctgcccctcgccctgcagagaagagaaccatgccaggggagaaggcacccagccatcctgacccagcgaggagccaactatcccaaatatacctgggtgaaatataccaaattctgcatctccagaggaaaataagaaataaagatgaattgttgcaactcttaaaaaaa

SEQ ID NO: 4 - DNA, 2115 bp, Homo sapiens
  misc_feature: phospholipid scramblase 1
  misc_feature (827)..(827): n is a, c, g, or t
  misc_feature (829)..(830): n is a, c, g, or t
  misc_feature (832)..(834): n is a, c, g, or t
  misc_feature (836)..(838): n is a, c, g, or t
  misc_feature (1195)..(1195): n is a, c, g, or t
  misc_feature (1203)..(1210): n is a, c, g, or t
  misc_feature (2110)..(2110): n is a, c, g, or t
cctccagtagtctcgtgggtccccgagcgccagcgcggggaaccgggaaaaggaaaccgtgttgtgtacgtaagattcaggaaacgaaaccaggagccgcgggtgttggcgcaaaggttactcccagacccttttccggctgacttctgagaaggttgcgcagcagctgtgcccggcagtctagaggcgcagaagaggaagccatcgcctggccccggctctctggaccttgtctcgctcgggagcggaaacagcggcagccagagaactgttttaatcatggacaaacaaaactcacagatgaatgcttctcacccggaaacaaacttgccagttgggtatcctcctcagtatccaccgacagcattccaaggacctccaggatatagtggctaccctgggccccaggtcagctacccacccccaccagccggccattcaggtcctggcccagctggctttcctgtcccaaatcagccagtgtataatcagccagtatataatcagccagttggagctgcaggggtaccatggatgccagcgccacagcctccattaaactgtccacctggattagaatatttaagtcagatagatcagatactgattcatcagcaaattgaacttctggaagttttaacaggttttgaaactaataacaaatatgaaattaagaacagctttggacagagggtttactttgcagcggaagatactgattgctgtacccgaaattgctgtgggccatctagaccttttaccttgaggattattgataatatgggtcaagaagtcataactctggagagaccactaagatgtagcancnntnnntnnncctgctgccttcaggagatagaaatccaagctcctcctggtgtaccaataggttatgttattcagacttggcacccatgtctaccaaagtttacaattcaaaatgagaaaagagaggatgtactaaaaataagtggtccatgtgttgtgtgcagctgttgtggagatgttgattttgagattaaatctcttgatgaacagtgtgtggttggcaaaatttccaagcactggactggaattttgagagaggcatttacagacgctgataactttggaatccagttccctttagaccttgatgttaaaatgaaagctgtaatgattggtgcctgtttcctcattgacttcatgttttttngaaagcannnnnnnngccaggaacaaaaatcaggagtgtggtagtggattagtgaaagtctcctcaggaaatctgaagtctgtatattgattgagactatctaaactcatacctgtatgaattaagctgtaaggcctgtagctctggttgtatacttttgcttttcaaattatagtttatcttctgtataactgatttataaaggtttttgtacattttttaatactcattgtcaatttgagaaaaaggacatatgagtttttgcatttattaatgaaacttcctttgaaaaactgctttgaattatgatctctgattcattgtccattttactaccaaatattaactaaggccttattaatttttatataaattatatcttgtcctattaaatctagttacaatttatttcatgcataagagctaatgttattttgcaaatgccatatattcaaaaaagctcaaagataattttctttactattatgttcaaataatattcaatatgcatattatctttaaaaagttaaatgtttttttaatcttcaagaaatcatgctacacttaacttctcctagaagctaatctataccataatattttcatattcacaagatattaaattaccaattttcaaattattgttagtaaagaacaaaatgattctctcccaaagaaagacacattttaaatactccttcactctaaaactctggtattataacttttgaaagttaatatttctacatgaaatgtttagctcttacactctatccttcctagaaaatggtaattgagattactcagatattaattaaatacaatatcatatatatattcacagagtataaacctaaataatgatctattagattcaaatatttgaaataaaaacttgatttttttgtaaaaaanaaaaa

SEQ ID NO: 5 - DNA, 1072 bp, Homo sapiens
  misc_feature: complement component 1, q subcomponent, beta polypeptide
gataggatcaccacggtggtaacctctcacattgtcttctccacaggaggcgtctgacacagtatgatgatgaagatcccatggggcagcatcccagtactgatcttgctcctgctcctgggcctaatcgatatctcccaggcccagctcagctgcaccgggcccccagccatccctggcatcccgggtatccctgggacacctggccccgatggccaacctgggaccccagggataaaaggagagaaagggcttccagggctggctggagaccatggtgagttcggagagaagggagacccagggattcctgggaatccaggaaaagtcggccccaagggccccatgggccctaaaggtggcccaggggcccctggagccccaggccccaaaggtgaatcgggagactacaaggccacccagaaaatcgccttctctgccacaagaaccatcaacgtccccctgcgccgggaccagaccatccgcttcgaccacgtgatcaccaacatgaacaacaattatgagccccgcagtggcaagttcacctgcaaggtgcccggtctctactacttcacctaccacgccagctctcgagggaacctgtgcgtgaacctcatgcgtggccgggagcgtgcacagaaggtggtcaccttctgtgactatgcctacaacaccttccaggtcaccaccggtggcatggtcctcaagctggagcagggggagaacgtcttcctgcaggccaccgacaagaactcactactgggcatggagggtgccaacagcatcttttccgggttcctgctctttccagatatggaggcctgacctgtgggctgcttcacatccaccccggctccccctgccagcaacgctcactctacccccaacaccaccccttgcccagccaatggacacagtagggcttggtgaatgctgctgagtgaatgagtaaataaactcttcaaggccaaggaacagtggtctaattcaactctgtgtcccagcactggcacaccagaagtgccatgctcagaaatgttggttacatgaatgaatgaaccatgaatgaatg

SEQ ID NO: 6 - DNA, 1642 bp, Homo sapiens
  misc_feature: interferon-induced protein with tetratricopeptide repeats 1
ccagatctcagaggagcctggctaagcaaaaccctgcagaacggctgcctaatttacagcaaccatgagtacaaatggtgatgatcatcaggtcaaggatagtctggagcaattgagatgtcactttacatgggagttatccattgatgacgatgaaatgcctgatttagaaaacagagtcttggatcagattgaattcctagacaccaaatacagtgtgggaatacacaacctactagcctatgtgaaacacctgaaaggccagaatgaggaagccctgaagagcttaaaagaagctgaaaacttaatgcaggaagaacatgacaaccaagcaaatgtgaggagtctggtgacctggggcaactttgcctggatgtattaccacatgggcagactggcagaagcccagacttacctggacaaggtggagaacatttgcaagaagctttcaaatcccttccgctatagaatggagtgtccagaaatagactgtgaggaaggatgggccttgctgaagtgtggaggaaagaattatgaacgggccaaggcctgctttgaaaaggtgcttgaagtggaccctgaaaaccctgaatccagcgctgggtatgcgatctctgcctatcgcctggatggctttaaattagccacaaaaaatcacaagccattttctttgcttcccctaaggcaggctgtccgcttaaatccagacaatggatatattaaggttctccttgccctgaagcttcaggatgaaggacaggaagctgaaggagaaaagtacattgaagaagctctagccaacatgtcctcacagacctatgtctttcgatatgcagccaagttttaccgaagaaaaggctctgtggataaagctcttgagttattaaaaaaggccttgcaggaaacacccacttctgtcttactgcatcaccagatagggctttgctacaaggcacaaatgatccaaatcaaggaggctacaaaagggcagcctagagggcagaacagagaaaagctagacaaaatgataagatcagccatatttcattttgaatctgcagtggaaaaaaagcccacatttgaggtggctcatctagacctggcaagaatgtatatagaagcaggcaatcacagaaaagctgaagagaattttcaaaaattgttatgcatgaaaccagtggtagaagaaacaatgcaagacatacatttctactatggtcggtttcaggaatttcaaaagaaatctgacgtcaatgcaattatccattatttaaaagctataaaaatagaacaggcatcattaacaagggataaaagtatcaattctttgaagaaattggttttaaggaaacttcggagaaaggcattagatctggaaagcttgagcctccttgggttcgtctataaattggaaggaaatatgaatgaagccctggagtactatgagcgggccctgagactggctgctgactttgagaactctgtgagacaaggtccttaggcacccagatatcagccactttcacatttcatttcattttatgctaacatttactaatcatcttttctgcttactgttttcagaaacattataattcactgtaatgatgtaattcttgaataataaatctgacaaaatatt

SEQ ID NO: 7 - DNA, 1075 bp, Homo sapiens
  misc_feature: tissue inhibitor of metalloproteinase 2
cgcagcaaacacatccgtagaaggcagcgcggccgccgagagccgcagcgccgctcgcccgccgccccccaccccgccgccccgcccggcgaattgcgccccgcgcccctcccctcgcgcccccgagacaaagaggagagaaagtttgcgcggccgagcggggcaggtgaggagggtgagccgcgcgggaggggcccgcctcggccccggctcagcccccgcccgcgcccccagcccgccgccgcgagcagcgcccggaccccccagcggcggcccccgcccgcccagccccccggcccgccatgggcgccgcggcccgcaccctgcggctggcgctcggcctcctgctgctggcgacgctgcttcgcccggccgacgcctgcagctgctccccggtgcacccgcaacaggcgttttgcaatgcagatgtagtgatcagggccaaagcggtcagtgagaaggaagtggactctggaaacgacatttatggcaaccctatcaagaggatccagtatgagatcaagcagataaagatgttcaaagggcctgagaaggatatagagtttatctacacggccccctcctcggcagtgtgtggggtctcgctggacgttggaggaaagaaggaatatctcattgcaggaaaggccgagggggacggcaagatgcacatcaccctctgtgacttcatcgtgccctgggacaccctgagcaccacccagaagaagagcctgaaccacaggtaccagatgggctgcgagtgcaagatcacgcgctgccccatgatcccgtgctacatctcctccccggacgagtgcctctggatggactgggtcacagagaagaacatcaacgggcaccaggccaagttcttcgcctgcatcaagagaagtgacggctcctgtgcgtggtaccgcggcgcggcgccccccaagcaggagtttctcgacatcgaggacccataagcaggcctccaacgcccctgtggccaactgcaaaaaaagcctccaagggtttcgactggtccagctctgacatcccttcctggaaacagcatgaataaaacactcatccc

SEQ ID NO: 8 - DNA, 4034 bp, Homo sapiens
  misc_feature: interferon-induced protein with tetratricopeptide repeats 5
  misc_feature (78)..(78): n is a, c, g, or t
  misc_feature (81)..(81): n is a, c, g, or t
  misc_feature (85)..(86): n is a, c, g, or t
  misc_feature (88)..(90): n is a, c, g, or t
  misc_feature (92)..(96): n is a, c, g, or t
  misc_feature (141)..(141): n is a, c, g, or t
  misc_feature (144)..(144): n is a, c, g, or t
  misc_feature (1257)..(1257): n is a, c, g, or t
  misc_feature (2369)..(2369): n is a, c, g, or t
  misc_feature (2374)..(2375): n is a, c, g, or t
  misc_feature (2395)..(2398): n is a, c, g, or t
  misc_feature (2499)..(2499): n is a, c, g, or t
  misc_feature (2939)..(2940): n is a, c, g, or t
  misc_feature (2951)..(2951): n is a, c, g, or t
  misc_feature (3156)..(3156): n is a, c, g, or t
  misc_feature (3158)..(3159): n is a, c, g, or t
  misc_feature (3161)..(3161): n is a, c, g, or t
  misc_feature (4015)..(4018): n is a, c, g, or t
atctgattcaatctccagtttcctgttcttgctggggctggggtctctcctttaacaaagacacgccgcgcggccgantcnaggnncnnnannnnnctggcgcgcgcacgcgcacgcgcacgcccaccgcgcggcttcccncgntccccggtgctgaggagagagcgatccgagggactgcgccgcccggacggcctgcagagcgctgccatcatgagtgaaattcgtaaggacaccttgaaggccattctgttggagttagaatgtcattttacatggaatttacttaaggaagacattgatctgtttgaggtagaagatacaattgggcaacagcttgaatttcttaccacaaaatctagacttgctctttataacctattggcctatgtgaaacacctaaaaggccaaaataaagacgcccttgagtgcttggaacaagcagaagaaataatccagcaagaacactcagacaaagaagaagtacgaagcctggtcacttggggaaactatgcctgggtgtattatcacatggaccagcttgaagaagctcagaagtatacaggtaagatagggaatgtctgtaagaaattgtccagtccttctaactacaagttggagtgtcctgagactgactgtgagaaaggctgggcactcttgaaatttggaggaaagtattatcaaaaggctaaagcggcttttgagaaggctctggaagtggagcctgacaatccagaatttaacatcggctatgctatcacagtgtatcggctggatgattctgatagagaagggtctgtaaagagcttttctctggggcctttgagaaaggctgttaccctgaacccagataacagctatattaaggtttttctggcactgaagcttcaagatgtacatgcagaagctgaaggggaaaagtatattgaagaaatcctggaccaaatatcatcccagccttacgtccttcgttatgcagccaagttctataggagaaaaaattcctggaacaaagctctcgaacttttaaaaaaggccttggaggtgacaccaacttcttctttcctgcatcaccagatgggactttgctacagggcacaaatgatccaaatcaagaaggccacacacaacagacctaaaggaaaggataaactaaaggttgatgagctgatttcatctgctatatttcatttcaaagcagccatggaacgagactctatgtttgcatttgcctacacagacctggccaacatgtangctgaaggaggccagtatagcaatgctgaggacattttccggaaagctcttcgtctggagaacataaccgatgatcacaaacatcagatccattaccactatggccgctttcaggaatttcaccgtaaatcagaaaatactgccatccatcattatttagaagccttaaaggtcaaagacagatcaccccttcgcaccaaactgacaagtgctctgaagaaattgtctaccaagagactttgtcacaatgctttagatgtgcagagtttaagtgccctagggtttgtttacaagctggaaggagaaaagaggcaagctgctgagtactatgagaaggcacaaaagatagatccagaaaatgcagaattcctgactgctctctgtgagctccgactttccatttaaatacatactctaggaaattagctctaagtttttcccttcattttgggttctcctgtttgttttttttttattattttaatcccttgtttattatagagctaatatttattgaatagttattgtgtaccaagcattgtgctaaatactttatatgcattatgatgaatcttgtgcggttttctttctttttttctttttaattaaaatactataatccattgagaaatagcaatattctagctattgtaacttctaaaaatggtatggccattagatctgtgctttttatctctgctctttgaatttctcatattatatagtaaatatattcctacgtaaacctttgatacctagatcaggaatactcttccaggagtacaaaattacattattgatagttaagctcttaattgtgtagcttgcaaaagacagcactttttagttacagatgttttgactttgatgaggatatttagctatcaatctaatagtcacctaaaatatcttttttgttggaaaaaagtttataataaaaaagtttgtcatctctagtgacttcaataaagaaaaaactagaagaggagaaaaaggatttcctcaaattttaaatatgtaacttcagggattcaatccccaaatgtttattaagtagctagaaataattatgtggaaaaaaatgaataatggaaaatagtgagtctcaaatngttcnntttttttttttaactaaaannnntctgcaatgaatctagatgcaattaattttattccttccaactaaaattacaatatttttaggttaaaattattgagatataaagcagccattgggaaatngggagaaatgataaacaaatggaaaaagaagatgtccctaacctacacccatagattaccaaggtttcagtgtactagttttgaatctgttctgaatggagtttttataccctcaatttctggcctttggctattttagcatttcaaagtgacttctatgaagctttttttttaatgtgaaattttcagaatgttgtttttttcatgtagatactccaggaagagttaagcactgctttcagttttaatatccaccttgaggggtcgctgcttgagggctcttatcccaggggactttttaattcggatgttacttaatgtggcttctctaatgtagtttctttgattaccgactacacaattatgtaccatcacagtattagtggaaaagtaccatgtgatttaattctccattcctccaatgtaactcttaaaattannatgtatgtgtntgtgttttactttttgttttttatcatctttaaaatttctattatggtttgattattataaaaataatgaattctcactgtaaatttcaaaaaaaaaattacaaaagtatgtgaatttaaaaatgagagcagtcccctcaccctaccacagttccacaccctcaaggtaaacttataacttataatttgatatgtaaacttccananntnttttctatgcgtaatcagacatacatatatactgcagtgtatctcacgtattaatttttaaaaatcttttgttttacttaattctgtttttattattattattattttgtttgatctattaaggaagaacaaggaagggaatgatctttactcaagaatttcagaaagtcagcactgaagtcctgacctatcagtagacacatttgtccctttcagatattttaggatattctagcaaagcaggccatttctcccacctgaaagtacataacttctatcacttgccacataattaaaagaactcacattaagcggttactcagacagttaatcatagaaaagattatttgcttcatcagttcatagaaaatatctgttgcttcatcagttaacttgtttttataaatcagggcctgtgttcatacacagaaggggcctgagatttctgcactttaaacaagctcctcctaggtgaggatgctgtggctgttctaattacattttgagtagtaaggtctacagcattgttcctcaaacttggctacgtattggaatcacctaaaaagttaaaacaaaacatggatgtctgggtcccgccccatagagaatgacttaattggcatggggtgcagtccaggcatcatgatttttagatttcccagttggaacttgtgcagcaaagtttgggagctactgatggacatgtgaaaagtaagtataaatggaataaaattaattaggctaataggcttaacccaggaaatcctaagttccttgaatatccagtttgcatttgggactcctcatcatatacttggtatataatactctaataaaagctgcctgagttgaannnnaaaaaaaaaaaaaaaa

SEQ ID NO: 9 - DNA, 2545 bp, Homo sapiens
  misc_feature: chemokine (C-X-C motif) ligand 9
atccaatacaggagtgacttggaactccattctatcactatgaagaaaagtggtgttcttttcctcttgggcatcatcttgctggttctgattggagtgcaaggaaccccagtagtgagaaagggtcgctgttcctgcatcagcaccaaccaagggactatccacctacaatccttgaaagaccttaaacaatttgccccaagcccttcctgcgagaaaattgaaatcattgctacactgaagaatggagttcaaacatgtctaaacccagattcagcagatgtgaaggaactgattaaaaagtgggagaaacaggtcagccaaaagaaaaagcaaaagaatgggaaaaaacatcaaaaaaagaaagttctgaaagttcgaaaatctcaacgttctcgtcaaaagaagactacataagagaccacttcaccaataagtattctgtgttaaaaatgttctattttaattataccgctatcattccaaaggaggatggcatataatacaaaggcttattaatttgactagaaaatttaaaacattactctgaaattgtaactaaagttagaaagttgattttaagaatccaaacgttaagaattgttaaaggctatgattgtctttgttcttctaccacccaccagttgaatttcatcatgcttaaggccatgattttagcaatacccatgtctacacagatgttcacccaaccacatcccactcacaacagctgcctggaagagcagccctaggcttccacgtactgcagcctccagagagtatctgaggcacatgtcagcaagtcctaagcctgttagcatgctggtgagccaagcagtttgaaattgagctggacctcaccaagctgctgtggccatcaacctctgtatttgaatcagcctacaggcctcacacacaatgtgtctgagagattcatgctgattgttattgggtatcaccactggagatcaccagtgtgtggctttcagagcctcctttctggctttggaagccatgtgattccatcttgcccgctcaggctgaccactttatttctttttgttcccctttgcttcattcaagtcagctcttctccatcctaccacaatgcagtgcctttcttctctccagtgcacctgtcatatgctctgatttatctgagtcaactcctttctcatcttgtccccaacaccccacagaagtgctttcttctcccaattcatcctcactcagtccagcttagttcaagtcctgcctcttaaataaacctttttggacacacaaattatcttaaaactcctgtttcacttggttcagtaccacatgggtgaacactcaatggttaactaattcttgggtgtttatcctatctctccaaccagattgtcagctccttgagggcaagagccacagtatatttccctgtttcttccacagtgcctaataatactgtggaactaggttttaataattttttaattgatgttgttatgggcaggatggcaaccagaccattgtctcagagcaggtgctggctctttcctggctactccatgttggctagcctctggtaacctcttacttattatcttcaggacactcactacagggaccagggatgatgcaacatccttgtctttttatgacaggatgtttgctcagcttctccaacaataagaagcacgtggtaaaacacttgcggatattctggactgtttttaaaaaatatacagtttaccgaaaatcatataatcttacaatgaaaaggactttatagatcagccagtgaccaaccttttcccaaccatacaaaaattccttttcccgaaggaaaagggctttctcaataagcctcagctttctaagatctaacaagatagccaccgagatccttatcgaaactcattttaggcaaatatgagttttattgtccgtttacttgtttcagagtttgtattgtgattatcaattaccacaccatctcccatgaagaaagggaacggtgaagtactaagcgctagaggaagcagccaagtcggttagtggaagcatgattggtgcccagttagcctctgcaggatgtggaaacctccttccaggggaggttcagtgaattgtgtaggagaggttgtctgtggccagaatttaaacctatactcactttcccaaattgaatcactgctcacactgctgatgatttagagtgctgtccggtggagatcccacccgaacgtcttatctaatcatgaaactccctagttccttcatgtaacttccctgaaaaatctaagtgtttcataaatttgagagtctgtgacccacttaccttgcatctcacaggtagacagtatataactaacaaccaaagactacatattgtcactgacacacacgttataatcatttatcatatatatacatacatgcatacactctcaaagcaaataatttttcacttcaaaacagtattgacttgtataccttgtaatttgaaatattttctttgttaaaatagaatggtatcaataaatagaccattaatcag

SEQ ID NO: 10 - DNA, 841 bp, Homo sapiens
  misc_feature: interferon, alpha-inducible protein (clone IFI-6-16)
gaaccgtttactcgctgctgtgcccatctatcagcaggctccgggctgaagattgcttctcttctctcctccaaggtctagtgacggagcccgcgcgcggcgccaccatgcggcagaaggcggtatcgcttttcttgtgctacctgctgctcttcacttgcagtggggtggaggcaggtgagaatgcgggtaaggatgcaggtaagaaaaagtgctcggagagctcggacagcggctccgggttctggaaggccctgaccttcatggccgtcggaggaggactcgcagtcgccgggctgcccgcgctgggcttcaccggcgccggcatcgcggccaactcggtggctgcctcgctgatgagctggtctgcgatcctgaatgggggcggcgtgcccgccggggggctagtggccacgctgcagagcctcggggctggtggcagcagcgtcgtcataggtaatattggtgccctgatgggctacgccacccacaagtatctcgatagtgaggaggatgaggagtagccagcagctcccagaacctcttcttccttcttggcctaactcttccagttaggatctagaactttgcctttttttttttttttttttttttttgagatgggttctcactatattgtccaggctagagtgcagtggctattcacagatgcgaacatagtacactgcagcctccaactcctagcctcaagtgatcctcctgtctcaacctcccaagtaggattacaagcatgcgccgacgatgcccagaatccagaactttgtctatcactctccccaacaacctagatgtgaaaacagaataaacttcacccagaaaa

SEQ ID NO: 11 - DNA, 2058 bp, Homo sapiens
  misc_feature: interferon-induced protein 44-like
gcacgaggaagccacagatctcttaagaactttctgtctccaaaccgtggctgctcgataaatcagacagaacagttaatcctcaatttaagcctgatctaacccctagaaacagatatagaacaatggaagtgacaacaagattgacatggaatgatgaaaatcatctgcgcaactgcttggaaatgtttctttgagtcttctctataagtctagtgttcatggaggtagcattgaagatatggttgaaagatgcagccgtcagggatgtactataacaatggcttacattgattacaatatgattgtagcctttatgcttggaaattatattaatttacgtgaaagttctacagagccaaatgattccctatggttttcacttcaaaagaaaaatgacaccactgaaatagaaactttactcttaaatacagcaccaaaaattattgatgagcaactggtgtgtcgtttatcgaaaacggatattttcattatatgtcgagataataaaatttatctagataaaatgataacaagaaacttgaaactaaggttttatggccaccgtcagtatttggaatgtgaagtttttcgagttgaaggaattaaggataacctagacgacataaagaggataattaaagccagagagcacagaaataggcttctagcagacatcagagactataggccctatgcagacttggtttcagaaattcgtattcttttggtgggtccagttgggtctggaaagtccagttttttcaattcagtcaagtctatttttcatggccatgtgactggccaagccgtagtggggtctgataccaccagcataaccgagcggtataggatatattctgttaaagatggaaaaaatggaaaatctctgccatttatgttgtgtgacactatggggctagatggggcagaaggagcaggactgtgcatggatgacattccccacatcttaaaaggttgtatgccagacagatatcagtttaattcccgtaaaccaattacacctgagcattctacttttatcacctctccatctctgaaggacaggattcactgtgtggcttatgtcttagacatcaactctattgacaatctctactctaaaatgttggcaaaagtgaagcaagttcacaaagaagtattaaactgtggtatagcatatgtggccttgcttactaaagtggatgattgcagtgaggttcttcaagacaactttttaaacatgagtagatctatgacttctcaaagccgggtcatgaatgtccataaaatgctaggcattcctatttccaatattttgatggttggaaattatgcttcagatttggaactggaccccatgaaggatattctcatcctctctgcactgaggcagatgctgcgggctgcagatgattttttagaagatttgcctcttgaggaaactggtgcaattgagagagcgttacagccctgcatttgagataagttgccttgattctgacatttggcccagcctgtactggtgtgccgcaatgagagtcaatctctattgacagcctgcttcagattttgcttttgttcgttttgccttctgtccttggaacagtcatatctcaagttcaaaggccaaaacctgagaagcggtgggctaagataggtcctactgcaaaccacccctccatatttccgtaccatttacaattcagtttctgtgacatctttttaaaccactggaggaaaaatgagatattctctaatttattcttctataacactctatatagagctatgtgagtactaatcacattgaataatagttataaaattattgtatagacatctgcttcttaaacagattgtgagttctttgagaaacagcgtggattttacttatctgtgtattcacagagcttagcacagtgcctggtaatgagcaagcatacttgccattacttttccttcccactctctccaacatcacattcactttaaatttttctgtatatagaaaggaaaactagcctgggcaacatgatgaaaccccatctccactgc

SEQ ID NO: 12 - DNA, 1172 bp, Homo sapiens
  misc_feature: chemokine (C-X-C motif) ligand 1
gagacattcctcaattgcttagacatattctgagcctacagcagaggaacctccagtctcagcaccatgaatcaaactgcgattctgatttgctgccttatctttctgactctaagtggcattcaaggagtacctctctctagaaccgtacgctgtacctgcatcagcattagtaatcaacctgttaatccaaggtctttagaaaaacttgaaattattcctgcaagccaattttgtccacgtgttgagatcattgctacaatgaaaaagaagggtgagaagagatgtctgaatccagaatcgaaggccatcaagaatttactgaaagcagttagcaaggaaatgtctaaaagatctccttaaaaccagaggggagcaaaatcgatgcagtgcttccaaggatggaccacacagaggctgcctctcccatcacttccctacatggagtatatgtcaagccataattgttcttagtttgcagttacactaaaaggtgaccaatgatggtcaccaaatcagctgctactactcctgtaggaaggttaatgttcatcatcctaagctattcagtaataactctaccctggcactataatgtaagctctactgaggtgctatgttcttagtggatgttctgaccctgcttcaaatatttccctcacctttcccatcttccaagggtactaaggaatctttctgctttggggtttatcagaattctcagaatctcaaataactaaaaggtatgcaatcaaatctgctttttaaagaatgctctttacttcatggacttccactgccatcctcccaaggggcccaaattctttcagtggctacctacatacaattccaaacacatacaggaaggtagaaatatctgaaaatgtatgtgtaagtattcttatttaatgaaagactgtacaaagtataagtcttagatgtatatatttcctatattgttttcagtgtacatggaataacatgtaattaagtactatgtatcaatgagtaacaggaaaattttaaaaatacagatagatatatgctctgcatgttacataagataaatgtgctgaatggttttcaaataaaaatgaggtactctcctggaaatattaagaaagactatctaaatgttgaaagatcaaaaggttaataaagtaattataact

SEQ ID NO: 13 - DNA, 2961 bp, Homo sapiens
  misc_feature: myxovirus (influenza virus) resistance 2 (mouse)
aagagatgatttctccatcctgaacgtgcagcgagcttgtcaggaagatcggaggtgccaagtagcagagaaagcatcccccagctctgacagggagacagcacatgtctaaggcccacaagccttggccctaccggaggagaagtcaattttcttctcgaaaatacctgaaaaaagaaatgaattccttccagcaacagccaccgccattcggcacagtgccaccacaaatgatgtttcctccaaactggcagggggcagagaaggacgctgctttcctcgccaaggacttcaactttctcactttgaacaatcagccaccaccaggaaacaggagccaaccaagggcaatggggcccgagaacaacctgtacagccagtacgagcagaaggtgcgcccctgcattgacctcatcgactccctgcgggctctgggtgtggagcaggacctggccctgccagccatcgccgtcatcggggaccagagctcgggcaagagctctgtgctggaggcactgtcaggagtcgcgcttcccagaggcagcggaatcgtaaccaggtgtccgctggtgctgaaactgaaaaagcagccctgtgaggcatgggccggaaggatcagctaccggaacaccgagctagagcttcaggaccctggccaggtggagaaagagatacacaaagcccagaacgtcatggccgggaatggccggggcatcagccatgagctcatcagcctggagatcacctcccctgaggttccagacctgaccatcattgaccttcccggcatcaccagggtggctgtggacaaccagccccgagacatcggactgcagatcaaggctctcatcaagaagtacatccagaggcagcagacgatcaacttggtggtggttccctgtaacgtggacattgccaccacggaggcgctgagcatggcccatgaggtggacccggaaggggacaggaccatcggtatcctgaccaaaccagatctaatggacaggggcactgagaaaagcgtcatgaatgtggtgcggaacctcacgtaccccctcaagaagggctacatgattgtgaagtgccggggccagcaggagatcacaaacaggctgagcttggcagaggcaaccaagaaagaaattacattctttcaaacacatccatatttcagagttctcctggaggaggggtcagccacggttccccgactggcagaaagacttaccactgaactcatcatgcatatccaaaaatcgctcccgttgttagaaggacaaataagggagagccaccagaaggcgaccgaggagctgcggcgttgcggggctgacatccccagccaggaggccgacaagatgttctttctaattgagaaaatcaagatgtttaatcaggacatcgaaaagttagtagaaggagaagaagttgtaagggagaatgagacccgtttatacaacaaaatcagagaggattttaaaaactgggtaggcatacttgcaactaatacccaaaaagttaaaaatattatccacgaagaagttgaaaaatatgaaaagcagtatcgaggcaaggagcttctgggatttgtcaactacaagacatttgagatcatcgtgcatcagtacatccagcagctggtggagcccgcccttagcatgctccagaaagccatggaaattatccagcaagctttcattaacgtggccaaaaaacattttggcgaatttttcaaccttaaccaaactgttcagagcacgattgaagacataaaagtgaaacacacagcaaaggcagaaaacatgatccaacttcagttcagaatggagcagatggttttttgtcaagatcagatttacagtgttgttctgaagaaagtccgagaagagatttttaaccctctggggacgccttcacagaatatgaagttgaactctcattttcccagtaatgagtcttcggtttcctcctttactgaaataggcatccacctgaatgcctacttcttggaaaccagcaaacgtctcgccaaccagatcccatttataattcagtattttatgctccgagagaatggtgactccttgcagaaagccatgatgcagatactacaggaaaaaaatcgctattcctggctgcttcaagagcagagtgagaccgctaccaagagaagaatccttaaggagagaatttaccggctcactcaggcgcgacacgcactctgtcaattctccagcaaagagatccactgaagggcggcgatgcctgtggttgttttcttgtgcgtactcattcattctaaggggagtcggtgcaggatgccgcttctgctttggggccaaactcttctgtcactatcagtgtccatctctactgtactccctcagcatcagagcatgcatcaggggtccacacaggctcagctctctccaccacccagctcttccctgaccttcacgaagggatggctctccagtccttgggtcccgtagcacacagttacagtgtcctaagatactgctatcattcttcgctaatttgtatttgtattcccttccccctacaagattatgagaccccagagggggaaggtctgggtcaaattcttcttttgtatgtccagtctcctgcacagcacctgcagcattgtaactgcttaataaatgacatctcactgaacgaatgagtgctgtgtaagtgatggagatacctgaggctattgctcaagcccaggccttggacatttagtgactgttagccggtccctttcagatccagtggccatgccccctgcttcccatggttcactgtcattgtgtttcccagcctctccactcccccgccagaaaggagcctgagtgattctcttttcttcttgtttccctgattatgatgagcttccattgttctgttaagtcttgaagaggaatttaataaagcaaagaaactttttaaaaacgt

SEQ ID NO: 14 - DNA, 490 bp, Homo sapiens
  misc_feature: defensin, alpha 1, myeloid-related sequence /// defensin, alpha 3, neutrophil-specific
ctatagaagacctgggacagaggactgctgtctgccctctctggtcaccctgcctagctagaggatctgtgaccccagccatgaggaccctcgccatccttgctgccattctcctggtggccctgcaggcccaggctgagccactccaggcaagagctgatgaggttgctgcagccccggagcagattgcagcggacatcccagaagtggttgtttcccttgcatgggacgaaagcttggctccaaagcatccaggctcaaggaaaaacatggcctgctattgcagaataccagcgtgcattgcaggagaacgtcgctatggaacctgcatctaccagggaagactctgggcattctgctgctgagcttgcagaaaaagaaaaatgagctcaaaatttgctttgagagctacagggaattgctattactcctgtaccttctgctcaatttcctttcctcatcccaaataaatgccttggtacaagaaaag

SEQ ID NO: 15 - DNA, 634 bp, Homo sapiens
  misc_feature: interferon, alpha-inducible protein (clone IFI-15K)
cggctgagaggcagcgaactcatctttgccagtacaggagcttgtgccgtggcccacagcccacagcccacagccatgggctgggacctgacggtgaagatgctggcgggcaacgaattccaggtgtccctgagcagctccatgtcggtgtcagagctgaaggcgcagatcacccagaagattggcgtgcacgccttccagcagcgtctggctgtccacccgagcggtgtggcgctgcaggacagggtcccccttgccagccagggcctgggccctggcagcacggtcctgctggtggtggacaaatgcgacgaacctctgagcatcctggtgaggaataacaagggccgcagcagcacctacgaggtccggctgacgcagaccgtggcccacctgaagcagcaagtgagcgggctggagggtgtgcaggacgacctgttctggctgaccttcgaggggaagcccctggaggaccagctcccgctgggggagtacggcctcaagcccctgagcaccgtgttcatgaatctgcgcctgcggggaggcggcacagagcctggcgggcggagctaagggcctccaccagcatccgagcaggatcaagggccggaaataaaggctgttgtaagagaat

SEQ ID NO: 16 - DNA, 1233 bp, Homo sapiens
  misc_feature: CD38 antigen (p45)
ctaaagctctcttgctgcctagcctcctgccggcctcatcttcgcccagccaaccccgcctggagccctatggccaactgcgagttcagcccggtgtccggggacaaaccctgctgccggctctctaggagagcccaactctgtcttggcgtcagtatcctggtcctgatcctcgtcgtggtgctcgcggtggtcgtcccgaggtggcgccagacgtggagcggtccgggcaccaccaagcgctttcccgagaccgtcctggcgcgatgcgtcaagtacactgaaattcatcctgagatgagacatgtagactgccaaagtgtatgggatgctttcaagggtgcatttatttcaaaacatccttgcaacattactgaagaagactatcagccactaatgaagttgggaactcagaccgtaccttgcaacaagattcttctttggagcagaataaaagatctggcccatcagttcacacaggtccagcgggacatgttcaccctggaggacacgctgctaggctaccttgctgatgacctcacatggtgtggtgaattcaacacttccaaaataaactatcaatcttgcccagactggagaaaggactgcagcaacaaccctgtttcagtattctggaaaacggtttcccgcaggtttgcagaagctgcctgtgatgtggtccatgtgatgctcaatggatcccgcagtaaaatctttgacaaaaacagcacttttgggagtgtggaagtccataatttgcaaccagagaaggttcagacactagaggcctgggtgatacatggtggaagagaagattccagagacttatgccaggatcccaccataaaagagctggaatcgattataagcaaaaggaatattcaattttcctgcaagaatatctacagacctgacaagtttcttcagtgtgtgaaaaatcctgaggattcatcttgcacatctgagatctgagccagtcgctgtggttgttttagctccttgactccttgtggtttatgtcatcatacatgactcagcatacctgctggtgcagagctgaagattttggagggtcctccacaataaggtcaatgccagagacggaagcctttttccccaaagtcttaaaataacttatatcatcagcatacctttattgtgatctatcaatagtcaagaaaaattattgtataagattagaatgaaaattgtatgttaagttacttcctttag

SEQ ID NO: 17 - DNA, 1326 bp, Homo sapiens
  misc_feature: XIAP associated factor-1
atggaaggagacttctcggtgtgcaggaactgtaaaagacatgtagtctctgccaacttcaccctccatgaggcttactgcctgcggttcctggtcctgtgtccggagtgtgaggagcctgtccccaaggaaaccatggaggagcactgcaagcttgagcaccagcaggttgggtgtacgatgtgtcagcagagcatgcagaagtcctcgctggagtttcataaggccaatgagtgccaggagcgccctgttgagtgtaagttctgcaaactggacatgcagctcagcaagctggagctccacgagtcctactgtggcagccggacagagctctgccaaggctgtggccagttcatcatgcaccgcatgctcgcccagcacagagatgtctgtcggagtgaacaggcccagctcgggaaaggggaaagaatttcagctcctgaaagggaaatctactgtcattattgcaaccaaatgattccagaaaataagtatttccaccatatgggtaaatgttgtccagactcagagtttaagaaacactttcctgttggaaatccagaaattcttccttcatctcttccaagtcaagctgctgaaaatcaaacttccacgatggagaaagatgttcgtccaaagacaagaagtataaacagatttcctcttcattctgaaagttcatcaaagaaagcaccaagaagcaaaaacaaaaccttggatccacttttgatgtcagagcccaagcccaggaccagctcccctagaggagataaagcagcctatgacattctgaggagatgttctcagtgtggcatcctgcttcccctgccgatcctaaatcaacatcaggagaaatgccggtggttagcttcatcaaaaaggaaaacaagtgagaaatttcagctagatttggaaaaggaaaggtactacaaattcaaaagatttcacttttaacactggcattcctgcctacttgctgtggtggtcttgtgaaaggtgatgggttttattcgttgggctttaaaagaaaaggtttggcagaactaaaaacaaaactcacgtatcatctcaatagatacagaaaaggcttttgataaaattcaacttgacttcatgttaaaaaccctcaacaaaccaggcgtcgaaggaacatacctcaaaataataagagccatctatgacaaaaccacagccaacatcatactgaatgagcaaaagctggagcattactcttgagaagtagaacaaggcacttcagtcctattcaacatagtactggaagtctcgccacagcaatcaggcaagagaaagaagtaaaaggcaccc

SEQ ID NO: 18 - DNA, 860 bp, Homo sapiens
  misc_feature: chemokine (C-C motif) ligand 13
aaaaggccggcggaacagccagaggagcagagaggcaaagaaacattgtgaaatctccaactcttaaccttcaacatgaaagtctctgcagtgcttctgtgcctgctgctcatgacagcagctttcaacccccagggacttgctcagccagatgcactcaacgtcccatctacttgctgcttcacatttagcagtaagaagatctccttgcagaggctgaagagctatgtgatcaccaccagcaggtgtccccagaaggctgtcatcttcagaaccaaactgggcaaggagatctgtgctgacccaaaggagaagtgggtccagaattatatgaaacacctgggccggaaagctcacaccctgaagacttgaactctgctacccctactgaaatcaagctggagtacgtgaaatgacttttccattctcctctggcctcctcttctatgctttggaatacttctaccataattttcaaataggatgcattcggttttgtgattcaaaatgtactatgtgttaagtaatattggctattatttgacttgttgctggtttggagtttatttgagtattgctgatcttttctaaagcaaggccttgagcaagtaggttgctgtctctaagcccccttcccttccactatgagctgctggcagtgggtttgtattcggttcccaggggttgagagcatgcctgtgggagtcatggacatgaagggatgctgcaatgtaggaaggagagctctttgtgaatgtgaggtgttgctaaatatgttattgtggaaagatgaatgcaatagtaggactgctgacattttgcagaaaatacattttatttaaaatctccaaaaaaaaaaa

SEQ ID NO: 19 - DNA, 3522 bp, Homo sapiens
  misc_feature: interleukin 18 receptor 1
gccatttgaagcagaatccaaaccatgaattgtagagaattacccttgaccctttgggtgcttatatctgtaagcactgcagaatcttgtacttcacgtccccacattactgtggttgaaggggaacctttctatctgaaacattgctcgtgttcacttgcacatgagattgaaacaaccaccaaaagctggtacaaaagcagtggatcacaggaacatgtggagctgaacccaaggagttcctcgagaattgctttgcatgattgtgttttggagttttggccagttgagttgaatgacacaggatcttactttttccaaatgaaaaattatactcagaaatggaaattaaatgtcatcagaagaaataaacacagctgtttcactgaaagacaagtaactagtaaaattgtggaagttaaaaaattttttcagataacctgtgaaaacagttactatcaaacactggtcaacagcacatcattgtataagaactgtaaaaagctactactggagaacaataaaaacccaacgataaagaagaacgccgagtttgaagatcaggggtattactcctgcgtgcatttccttcatcataatggaaaactatttaatatcaccaaaaccttcaatataacaatagtggaagatcgcagtaatatagttccggttcttcttggaccaaagcttaaccatgttgcagtggaattaggaaaaaacgtaaggctcaactgctctgctttgctgaatgaagaggatgtaatttattggatgttcggggaagaaaatggatcggatcctaatatacatgaagagaaagaaatgagaattatgactccagaaggcaaatggcatgcttcaaaagtattgagaattgaaaatattggtgaaagcaatctaaatgttttatataattgcactgtggccagcacgggaggcacagacaccaaaagcttcatcttggtgagaaaagcagacatggctgatatcccaggccacgtcttcacaagaggaatgatcatagctgttttgatcttggtggcagtagtgtgcctagtgactgtgtgtgtcatttatagagttgacttggttctattttatagacatttaacgagaagagatgaaacattaacagatggaaaaacatatgatgcttttgtgtcttacctaaaagaatgccgacctgaaaatggagaggagcacacctttgctgtggagattttgcccagggtgttggagaaacattttgggtataagttatgcatatttgaaagggatgtagtgcctggaggagctgttgttgatgaaatccactcactgatagagaaaagccgaagactaatcattgtcctaagtaaaagttatatgtctaatgaggtcaggtatgaacttgaaagtggactccatgaagcattggtggaaagaaaaattaaaataatcttaattgaatttacacctgttactgacttcacattcttgccccaatcactaaagcttttgaaatctcacagagttctgaagtggaaggccgataaatctctttcttataactcaaggttctggaagaaccttctttacttaatgcctgcaaaaacagtcaagccaggtagagacgaaccggaagtcttgcctgttctttccgagtcttaatcttcagaaacagtgaacgccaaaaagaactcaagatattctggggactgagcatatgaacctgttcataacaaaggctgtgactcgaaataattaactttgtcaaaatcctgctcacaatttgaagatgaaacttgtcattaggttggcgggaatgagactaaagattgcgctgtgggctgtggtcacgtgctcccagaagacctggaattcaaaagaaatggagctattctttttctccctctttcataactggatgcagctgctcatactcaatcccatattcagcaagtgtgaagctggacgtgatgcaaaataaccgatgccctacaaaaagggcgcatctttaagagttttaatgccagtgcttaattcgaatgaggggattttaagtgtctgaagaggcattttctagggaccagtgggtgactgagtaactgaaatgctgctttcactccctaacaccatggatctggttgtgcataggatgtgggaggaggggctggcagggccgccttcagaggctgcagggcctcagcctcaggatgcatttaatgtatcctggccacagttgcagccaacggttcttgaaagctcggtaaggccctgcaacgcagagcctgcttatgtggatctatttatgggaacttcttaaaaggaccccagaatagctctttatctttcacaagagacacaaattctaattgagttaattatctgggcctttcactttggatgctctgaaacatttgttgattttgtgtgaatgtttatatcaaaatgtttgccaggttgtattagccattgaatagcaaaaaactgatagttacttgcttgttttttaaaaattacatattaaaaatgcccttggcataaggcagcatggtgtggcagttaagagatgggctgtgcagcccatcctgagctccagtcctgagtttgctacttacttctgtggcctctggaaccttatccaacctcttggtgcttcagtttcctcatctgtgaaattagaatttataataattgcacctacctcccaggggtaactaaatgaataaatataataaagtacttacagtggttcctgacacagactcagcactccgtcagtgttgccatgactatttttattatcattattaatgattacttagatcaattatttagcagtggactaatggaagctacagagcagggaagggaagcagatctagggaggaaggcagttttgatttgaggaggtttgcacatgtagagaagcatactggagaagcatatccagagggcgaaagatatctctccattgtgcatctgcctcttttgacgttggaagacacatgtcttactccccaaagggagcccagcactgggagccttcttgatgatctcaaaaataatagctattcaagaaaatcaccaagtgactgtgaaaccgtcagttcggaaggctggttagaacatgtgggagcaacatgaatgttctacaaaagtttaaagcagagattgtttcaaatgggtgtagtagatattactgaaaaccaaaaaagagtgagattgtcagtgtaagaatgtgatttaatgtttgtagtgcttacaattttgtgtaccaactggatgactaaaaagagtaaaataacttaattaatagctcatattttatgtgtgaaaacatgttagtgaacatatataatcaaaatagatttcattgctattgcatagtctctaatacatagaatgattttgcttttctcttttattatacttgctttaaaatacttgaaatatattttgcattaaatgcatttcaagttaaatgtcttaaatgtatacattagatgtgtgttttaaaatgcataaaacacgttgaaa

SEQ ID NO: 20 - DNA, 1008 bp, Homo sapiens
  misc_feature: apolipoprotein B mRNA editing enzyme, catalytic polypeptide-like 3B
gcaattctagccttggtacaaattcgatgaaaattatgcattcctgcaccgcacgctaaaggagattctcagatacctgatggatccagacacattcactttcaactttaataatgaccctttggtccttcgacggcgccagacctacttgtgctatgaggtggagcgcctggacaatggctggatggtcctgatggaccagcacatgggctttctatgcaacgaggctaagaatcttctctgtggcttttacggccgccatgcggactggcgcttcttggacctggttccttctttgcagttggacccggcccagatctacagggtcacttggttcatctcctggagcccctgcttctcctggggctgtgccggggaagtgcgtgcgttccttcaggagaacacacacgtgagactgccgatcttcgctgcccgcatctatgattatgaccccctatataaggaggcgctgcaaatgctgcgggatgctggggcccaagtctccatcatgacctacgatgagtttgagtactgctgggacacctttgtgtaccgccagggatgtcccttccagccctgggatggactagaggagcacagccaagccctgagtgggaggctgcgggccattctccagaatcagggaaactgaaggatgggcctcagtctctaaggaaggcagagacctgggttgagcagcagaataaaagatcttcttccaagaaatgcaaacgagccgttcaccaccatctccagctgctcacagacaccagcaaagcaatgtgctcctgatcaagtagattttttaaaaatcagagtcaattaattttaattgaaaatttctcttatgttccaagtgtacaagagtaagattatgctcaatattcccagaatagttttcaatgtattaatgaagtgattaattggctccatatttagactaataaaacattaagaatcttccataattgtttccacaaacactaaaaaaaaaaaaaaaaaaaaaaa

SEQ ID NO: 21 - DNA, 1646 bp, Homo sapiens
  misc_feature: interferon regulatory factor 7
ggctctggcacccagggtccggcctgcgccttcccgccaggcctggacactggttcaacacctgtgacttcatgtgtgcgcgccggccacacctgcagtcacacctgtagccccctctgccaagagatccataccgaggcagcgtcggtggctacaagccctcagtccacacctgtggacacctgtgacacctggccacacgacctgtggccgcggcctggcgtctgctgcgacaggagcccttacctcccctgttataacacctgaccgccacctaactgcccctgcagaaggagcaatggccttggctcctgagagggcagccccacgcgtgctgttcggagagtggctccttggagagatcagcagcggctgctatgaggggctgcagtggctggacgaggcccgcacctgtttccgcgtgccctggaagcacttcgcgcgcaaggacctgagcgaggccgacgcgcgcatcttcaaggcctgggctgtggcccgcggcaggtggccgcctagcagcaggggaggtggcccgccccccgaggctgagactgcggagcgcgccggctggaaaaccaacttccgctgcgcactgcgcagcacgcgtcgcttcgtgatgctgcgggataactcgggggacccggccgacccgcacaaggtgtacgcgctcagccgggagctgtgctggcgagaaggcccaggcacggaccagactgaggcagaggcccccgcagctgtcccaccaccacaggcccagggctccctgctggggagctgtacgggtgggcagtagagacgacccccagccccgggccccagcccgcggcactaacgacaggcgaggccgcggccccagagtccccgcaccaggcagagccgtacctgtcaccctccccaagcgcctgcaccgcggtgcaagagcccagcccaggggcgctggacgtgaccatcatgtacaagggccgcacggtgctgcagaaggtggtgggacacccgagctgcacgttcctatacggccccccagacccagctgtccgggccacagacccccagcaggtagcattccccagccctgccgagctcccggaccagaagcagctgcgctacacggaggaactgctgcggcacgtggcccctgggttgcacctggagcttcgggggccacagctgtgggcccggcgcatgggcaagtgcaaggtgtactgggaggtgggcggacccccaggctccgccagcccctccaccccagcctgcctgctgcctcggaactgtgacacccccatcttcgacttcagagtcttcttccaagagctggtggaattccgggcacggcagcgccgtggctccccacgctataccatctacctgggcttcgggcaggacctgtcagctgggaggcccaaggagaagagcctggtcctggtgaagctggaaccctggctgtgccgagtgcacctagagggcacgcagcgtgagggtgtgtcttccctggatagcagcagcctcagcctctgcctgtccagcgccaacagcctctatgacgacatcgagtgcttccttatggagctggagcagcccgcctagaacccagtctaatgagaactccagaaagctggagcagcccacctagagctggccgcggccgc

SEQ ID NO: 22 - DNA, 2074 bp, Homo sapiens
  misc_feature: chromosome 6 open reading frame 11
ggcacgagggctgagaagagttttgcacgtggatcgccgttcgggtgggcgagatggagacagcccccaagccgggcaaggatgtcccgcccaagaaagacaaacttcagaccaagagaaagaaaccgcggcgatactgggaggaagagaccgttccgaccacagccggagcctctccagggcctcctcgtaacaagaagaatcgggagctccgtcctcagagaccaaaaaatgcttacatcttaaagaagtctcggatctctaagaagcctcaggtcccgaagaaaccccgagaatggaagaacccggagtcccagcgcggcttgtccggggcccaagatccattcccaggccccgcccccgtccctgtggaagtggtccagaagttctgtcgcattgacaaatcccgaaagctaccacattctaaagccaaaactcgaagccgacttgaggtggctgaagctgaggaagaggaaacaagtatcaaagctgctcgttctgagctgctgcttgctgaagaacctgggtttctggaaggggaggatggggaagacacagcaaagatatgccaggctgacattgtggaggctgtggacattgcaagtgcagccaagcactttgacttgaatctgcggcagtttggaccctacagactaaactactctcgaactggaagacacctggcttttggagggcgccgaggtcatgtggctgcccttgattgggtaacaaagaagcttatgtgcgagatcaacgtcatggaggcggtgcgggacatccggtttctccattctgaggcactgcttgctgttgctcagaaccgctggctccacatctatgacaatcagggcattgagctccactgtatccgccgctgtgaccgagtaacacggcttgagttcctgcccttccacttcctcctggctacagcttcagaaacagggtttctaacctacctggatgtgtcagtggggaagattgtggcagctctgaatgctcgagctgggcggctcgatgttatgagtcagaacccttacaatgccgtcatccatctcggacacagcaatggtactgtgtctttatggagtccagctatgaaggagccactggcaaagattctctgtcatcgtggtggggtccgggctgtggcagtagattctacaggcacgtacatggccacctctggcctagaccaccagctgaagatctttgacttgcgagggacgtaccagcctctgagcactcggaccctgccccatggagcagggcacctggccttctcccagaggggactgctggtggcgggaatgggtgacgttgtcaacatctgggcagggcagggcaaggccagcccaccctcccttgaacagccctacctcacccaccggctctcaggccctgtgcatggccttcagttctgcccctttgaagatgtgctgggggtggggcacactgggggcatcaccagcatgctggtccctggggccggtgagcccaacttcgatggcctggagagtaatccatacagaagccggaagcagcgccaggagtgggaggtgaaggccctgctagagaaggtacctgcagagcttatttgtctggacccacgagccctggccgaggtggatgtcatctccctggagcagggaaagaaggagcagatagagaggctgggctatgacccgcaggctaaggctcccttccagccaaagccaaagcagaagggccgcagctccacggcaagcctggtgaagaggaagaggaaggtcatggatgaggaacacagggacaaggtccggcagagccttcagcagcagcatcataaggaggcgaaggccaagcccacgggggcccggccatctgccctggacagatttgtgcgctgagccagactccagggttgcctgggaacagtctctccccaagatcacctgtagggaaatgagtgttccctggaacaaggaggtgggggcagtgtggccccttccccaactgggggtggacagctgtctcctggggtgggttggtattaaagaggaaagcgattttttggaaaaaaaaaaaaaaaaaaaaa

SEQ ID NO: 23 - DNA, 1741 bp, Homo sapiens
  misc_feature: chitinase 3-like 1 (cartilage glycoprotein-39)
ctaggtagctggcaccaggagccgtgggcaagggaagaggccacaccctgccctgctctgctgcagccagaatgggtgtgaaggcgtctcaaacaggctttgtggtcctggtgctgctccagtgctgctctgcatacaaactggtctgctactacaccagctggtcccagtaccgggaaggcgatgggagctgcttcccagatgcccttgaccgcttcctctgtacccacatcatctacagctttgccaatataagcaacgatcacatcgacacctgggagtggaatgatgtgacgctctacggcatgctcaacacactcaagaacaggaaccccaacctgaagactctcttgtctgtcggaggatggaactttgggtctcaaagattttccaagatagcctccaacacccagagtcgccggactttcatcaagtcagtaccgccattcctgcgcacccatggctttgatgggctggaccttgcctggctctaccctggacggagagacaaacagcattttaccaccctaatcaaggaaatgaaggccgaatttataaaggaagcccagccagggaaaaagcagctcctgctcagcgcagcactgtctgcggggaaggtcaccattgacagcagctatgacattgccaagatatcccaacacctggatttcattagcatcatgacctacgattttcatggagcctggcgtgggaccacaggccatcacagtcccctgttccgaggtcaggaggatgcaagtcctgacagattcagcaacactgactatgctgtggggtacatgttgaggctgggggctcctgccagtaagctggtgatgggcatccccaccttcgggaggagcttcactctggcttcttctgagactggtgttggagccccaatctcaggaccgggaattccaggccggttcaccaaggaggcagggacccttgcctactatgagatctgtgacttcctccgcggagccacagtccatagaaccctcggccagcaggtcccctatgccaccaagggcaaccagtgggtaggatacgacgaccaggaaagcgtcaaaagcaaggtgcagtacctgaaggataggcagctggcaggcgccatggtatgggccctggacctggatgacttccagggctccttctgcggccaggatctgcgcttccctctcaccaatgccatcaaggatgcactcgctgcaacgtagccctctgttctgcacacagcacgggggccaaggatgccccgtccccctctggctccagctggccgggagcctgatcacctgccctgctgagtcccaggctgagcctcagtctccctcccttggggcctatgcagaggtccacaacacacagatttgagctcagccctggtgggcagagaggtagggatggggctgtggggatagtgaggcatcgcaatgtaagactcgggattagtacacacttgttgatgattaatggaaatgtttacagatccccaagcctggcaagggaatttcttcaactccctgccccctagccctccttatcaaaggacaccattttggcaagctctatcaccaaggagccaaacatcctacaagacacagtgaccatactaattataccccctgcaaagccagcttgaaaccttcacttaggaacgtaatcgtgtcccctatcctacttccccttcctaattccacagctgctcaataaagtacaagagtttaacagtgtg

SEQ ID NO: 24 - DNA, 1082 bp, Homo sapiens
  misc_feature: suppressor of cytokine signaling 1
cagcgcacccccggacgctatggcccacccctccggctggccccttctgtaggatggtagcacacaaccaggtggcagccgacaatgcagtctccacagcagcagagccccgacggcggccagaaccttcctcctcttcctcctcctcgcccgcggcccccgcgcgcccgcggccgtgccccgcggtcccggccccggcccccggcgacacgcacttccgcacattccgttcgcacgccgattaccggcgcatcacgcgcgccagcgcgctcctggacgcctgcggattctactgggggcccctgagcgtgcacggggcgcacgagcggctgcgcgccgagcccgtgggcaccttcctggtgcgcgacagccgccagcggaactgctttttcgcccttagcgtgaagatggcctcgggacccacgagcatccgcgtgcactttcaggccggccgctttcacctggatggcagccgcgagagcttcgactgcctcttcgagctgctggagcactacgtggcggcgccgcgccgcatgctgggggccccgctgcgccagcgccgcgtgcggccgctgcaggagctgtgccgccagcgcatcgtggccaccgtgggccgcgagaacctggctcgcatccccctcaaccccgtcctccgcgactacctgagctccttccccttccagatttgaccggcagcgcccgccgtgcacgcagcattaactgggatgccgtgttattttgttattacttgcctggaaccatgtgggtaccctccccggcctgggttggagggagcggatgggtgtaggggcgaggcgcctcccgccctcggctggagacgaggccgcagaccccttctcacctcttgagggggtcctccccctcctggtgctccctctgggtccccctggttgttgtagcagcttaactgtatctggagccaggacctgaactcgcacctcctacctcttcatgtttacatatacccagtatctttgcacaaaccaggggttgggggagggtctctggctttatttttctgctgtgcagaatcctattttatattttttaaagtcagttta

SEQ ID NO: 25 - DNA, 1885 bp, Homo sapiens
  misc_feature: hemochromatosis
gttttactgggcatctcctgagcctaggcaatagctgtagggtgacttctggagccatccccgtttccccgccccccaaaagaagcggagatttaacggggacgtgcggccagagctggggaaatgggcccgcgagccaggccggcgcttctcctcctgatgcttttgcagaccgcggtcctgcaggggcgcttgctgcgttcacactctctgcactacctcttcatgggtgcctcagagcaggaccttggtctttccttgtttgaagctttgggctacgtggatgaccagctgttcgtgttctatgatcatgagagtcgccgtgtggagccccgaactccatgggtttccagtagaatttcaagccagatgtggctgcagctgagtcagagtctgaaagggtgggatcacatgttcactgttgacttctggactattatggaaaatcacaaccacagcaaggtgcctcctttggtgaaggtgacacatcatgtgacctcttcagtgaccactctacggtgtcgggccttgaactactacccccagaacatcaccatgaagtggctgaaggataagcagccaatggatgccaaggagttcgaacctaaagacgcattgcccaatggggatgggacctaccagggctggataaccttggctgtaccccctggggaagagcagagatatacgtgccaggtggagcacccaggcctggatcagcccctcattgtgatctgggagccctcaccgtctggcaccctagtcattggagtcattagtggaattgctgtttttgtcgtcatcttgttcattggaattttgttcataatattaaggaagaggcagggttcaagaggagccgtggggcactacgtcttagctgaacgtgagtgacacgcagcctgcagactcactgtgggaaggagacaaaactagagactcaaagagggagtgcatttatgagctcttcatgtttcaggagagagttgaacctaaacatagaaattgcctgacgaactccttgattttagccttctctgttcatttcctcaaaaagatttccccatttaggtttctgagttcctgcatgccggtgatccctagctgtgacctctcccctggaactgtctctcatgaacctcaagctgcatctagaggcttccttcatttcctccgtcacctcagagacatacacctatgtcatttcatttcctatttttggaagaggactccttaaatttgggggacttacatgattcattttaacatctgagaaaagctttgaaccctgggacgtggctagtcataaccttaccagatttttacacatgtatctatgcattttctggacccgttcaacttttcctttgaatcctctctctgtgttacccagtaactcatctgtcaccaagccttggggattcttccatctgattgtgatgtgagttgcacagctatgaaggctgtacactgcacgaatggaagaggcacctgtcccagaaaaagcatcatggctatctgtgggtagtatgatgggtgtttttagcaggtaggaggcaaatatcttgaaaggggttgtgaagaggtgttttttctaattggcatgaaggtgtcatacagatttgcaaagtttaatggtgccctcatttgggatgctactctagtattccagacctgaagaatcacaataattttctacctggtctctccttgttctgataatgaaaattatgataaggatgataaaagcacttacttcgtgtccgactcttctgagcacctacttacatgcattactgcatgcacttcttacaataattctatgagataggtactattatccccatttcttttttaaatgaagaaagtgaagtaggccgggcac

SEQ ID NO: 26 - DNA, 2149 bp, Homo sapiens
  misc_feature: aldehyde dehydrogenase 1 family, member A1
  misc_feature (5)..(5): n is a, c, g, or t
  misc_feature (22)..(23): n is a, c, g, or t
  misc_feature (25)..(25): n is a, c, g, or t
  misc_feature (39)..(39): n is a, c, g, or t
  misc_feature (303)..(303): n is a, c, g, or t
  misc_feature (707)..(707): n is a, c, g, or t
  misc_feature (1480)..(1480): n is a, c, g, or t
  misc_feature (2125)..(2125): n is a, c, g, or t
tgggnagagagatctgcagacnncnatcagaaccaaatngctgagccagtcacctgtgttccaggagccgaatcagaaatgtcatcctcaggcacgccagacttacctgtcctactcaccgatttgaagattcaatatactaagatcttcataaacaatgaatggcatgattcagtgagtggcaagaaatttcctgtctttaatcctgcaactgaggaggagctctgccaggtagaagaaggagataaggaggatgttgacaaggcagtgaaggccgcaagacaggcttttcagattggatcnccgtggcgtactatggatgcttccgagagggggcgactattatacaagttggctgatttaatcgaaagagatcgtctgctgctggcgacaatggagtcaatgaatggtggaaaactctattccaatgcatatctgaatgatttagcaggctgcatcaaaacattgcgctactgtgcaggttgggctgacaagatccagggccgtacaataccaattgatggaaatttttttacatatacaagacatgaacctattggtgtatgtggccaaatcattccttggaatttcccgttggttatgctcatttggaagatagggcctgcactgagctgtggaaacacagtggttgtcaaaccagcagagcaaactcctctcactgctctccacgtggcatctttaataanaagaggcagggtttcctcctggagtagtgaatattgttcctggttatgggcctacagcaggggcagccatttcttctcacatggatatagacaaagtagccttcacaggatcaacagaggttggcaagttgatcaaagaagctgccgggaaaagcaatctgaagagggtgaccctggagcttggaggaaagagcccttgcattgtgttagctgatgccgacttggacaatgctgttgaatttgcacaccatggggtattctaccaccagggccagtgttgtatagccgcatccaggatttttgtggaagaatcaatttatgatgagtttgttcgaaggagtgttgagcgggctaagaagtatatccttggaaatcctctgaccccaggagtcactcaaggccctcagattgacaaggaacaatatgataaaatacttgacctcattgagagtgggaagaaagaaggggccaaactggaatgtggaggaggcccgtgggggaataaaggctactttgtccagcccacagtgttctctaatgttacagatgagatgcgcattgccaaagaggagatttttggaccagtgcagcaaatcatgaagtttaaatctttagatgacgtgatcaaaagagcaaacaatactttctatggcttatcagcaggagtgtttaccaaagacattgataaagccataacaatctcctctgctctgcaggcaggaacagtgtgggtgaattgctatggcgtggtaagtgcccagtgcccctttggntgggattcaagatgtctggaaatggaagagaactgggagagtacggtttccatgaatatacagaggtcaaaacagtcacagtgaaaatctctcagaagaactcataaagaaaatacaagagtggagagaagctcttcaatagctaagcatctccttacagtcactaatatagtagattttaaagacaaaatttttcttttcttgatttttttaaacataagctaaatcatattagtattaatactacccatagaaaacttgacatgtagcttcttctgaaagaattatttgccttctgaaatgtgacccccaagtcctatcctaaataaaaaaagacaaattcggatgtatgatctctctagctttgtcatagttatgtgattttcctttgtagctacttttgcaggataataattttatagaaaaggaacagttgcatttagcttctttcccttagtgactcttgaagtacttaacatacacgttaactgcagagtaaattgctctgttcccagtagttataaagtccttggactgttttgaaaagtttcctaggatgtcatgtctgcttgtcaaaagaaataatccctgtaatatttagctgtaaactgaatataaagcttaataaaaacaaccttgcatganaaaaaaaaaaaaaaaaaaaaaaaa

SEQ ID NO: 27 - DNA, 5534 bp, Homo sapiens
  misc_feature: Protein kinase N2
  misc_feature (239)..(240): n is a, c, g, or t
  misc_feature (242)..(242): n is a, c, g, or t
  misc_feature (244)..(248): n is a, c, g, or t
  misc_feature (250)..(251): n is a, c, g, or t
  misc_feature (332)..(332): n is a, c, g, or t
  misc_feature (382)..(382): n is a, c, g, or t
  misc_feature (385)..(385): n is a, c, g, or t
  misc_feature (394)..(394): n is a, c, g, or t
  misc_feature (412)..(414): n is a, c, g, or t
  misc_feature (416)..(416): n is a, c, g, or t
  misc_feature (418)..(418): n is a, c, g, or t
  misc_feature (972)..(972): n is a, c, g, or t
  misc_feature (1503)..(1503): n is a, c, g, or t
  misc_feature (2126)..(2126): n is a, c, g, or t
  misc_feature (2517)..(2519): n is a, c, g, or t
  misc_feature (2523)..(2526): n is a, c, g, or t
  misc_feature (2528)..(2531): n is a, c, g, or t
  misc_feature (2533)..(2536): n is a, c, g, or t
  misc_feature (2568)..(2568): n is a, c, g, or t
  misc_feature (2571)..(2571): n is a, c, g, or t
  misc_feature (2645)..(2645): n is a, c, g, or t
  misc_feature (2683)..(2683): n is a, c, g, or t
  misc_feature (3302)..(3302): n is a, c, g, or t
  misc_feature (3306)..(3306): n is a, c, g, or t
  misc_feature (3473)..(3473): n is a, c, g, or t
  misc_feature (3601)..(3601): n is a, c, g, or t
  misc_feature (3682)..(3682): n is a, c, g, or t
  misc_feature (4364)..(4364): n is a, c, g, or t
  misc_feature (4368)..(4368): n is a, c, g, or t
  misc_feature (4373)..(4373): n is a, c, g, or t
  misc_feature (4378)..(4378): n is a, c, g, or t
  misc_feature (4383)..(4383): n is a, c, g, or t
  misc_feature (4420)..(4420): n is a, c, g, or t
  misc_feature (4558)..(4558): n is a, c, g, or t
  misc_feature (4689)..(4689): n is a, c, g, or t
  misc_feature (4721)..(4721): n is a, c, g, or t
  misc_feature (4996)..(4996): n is a, c, g, or t
  misc_feature (5027)..(5027): n is a, c, g, or t
  misc_feature (5363)..(5372): n is a, c, g, or t
  misc_feature (5375)..(5376): n is a, c, g, or t
  misc_feature (5378)..(5379): n is a, c, g, or t
gagcgctttggcgtccaaccccgaacggggggagattctgctcacggaactgcagggggattcccgaagtcttccgttttctgagaatgtgagtgctgttcaaaaattagacttttcagatacaatggtgcagcagaaattggatgatatcaaggatcgaattaagagagaaataaggaaagaactgaaaatcaaagaaggagctgaaaatctgaggaaagtcacaacagataaaaaanntntnnnnnanntagacaacattttgaaaaaatcaaataaaaaattagaagaactacatcacaagctgcaggaattaaatgcacatattgttngtatcagatccagaagatattacagattgcccaaggactccagatactcnaantaatgaccntcgttgttctactagcannnananattgaaggccttacaaaaacaattggatatagaacttaaagtaaaacaaggtgcagagaatatgatacagatgtattcaaatggatcttcaaaggatcggaaactccatggtacagctcagcaactgctccaggacagcaagacaaaaatagaagtcatacgaatgcagattcttcaggcagtccagactaatgaattggcttttgataatggtgatggaataaattgtcctccttcttatgagcataatgcaaaacctgtgataagtcctcttgaacttcggatggaagaattaaggcatcattttaggatagagtttgcagtagcagaaggtgcaaagaatgtaatgaaattacttggctcaggaaaagtaacagacagaaaagcactttcagaagctcaagcaagatttaatgaatcaagtcagaagttggaccttttaaagtattcattagagcaaagattaaacgaagtccccaagaatcatcccaaaagcaggattattattgaagaactttcacttgttgctgcatcaccaacactaagtccacgtnaaagtatgatatctacgcaaaatcaatatagtacactatccaaaccagcagcactaacaggtactttggaagttcgtcttatgggctgccaagatatcctagagaatgtccctggacggtcaaaagcaacatcagttgcactgcctggttggagtccaagtgaaaccagatcatctttcatgagcagaacgagtaaaagtaaaagcggaagtagtcgaaatcttctaaaaaccgatgacttgtccaatgatgtctgtgctgttttgaagctcgataatactgtggttggccaaactagctggaaacccatttccaatcagtcatgggaccagaagtttacactggaactggacaggtcacgtgaactggaaatttcagtttattggcgtgattggcggtctctgtgtgctgtaaaatttctgaggttagaagattttttagacaaccaacggcatggcatgtgtctctatttggaaccacagggtactttatttgcagaggttaccttttttaatccagttattgaaagangaccaaaacttcaaagacaaaagaaaattttttcaaagcaacaaggcaaaacatttctcagagctcctcaaatgaatattaatattgccacttggggaaggctagtaagaagagctattcctacagtaaatcattctggcaccttcagccctcaagctcctgtgcctactacagtgccagtggttgatgtacgcatccctcaactagcacctccagctagtgattctacagtaaccaaattggactttgatcttgagcctgaacctcctccagccccaccacgagcttcttctcttggagaaatagatgaatcttctgaattaagagttttggatataccaggacaggattcagagactgtttttgatattcagaatgacagaaatagtatacttccaaaatctcaatctgaatacaagcctgatactcctcagtcaggcctagaatatagtggtattcaagaacttgaggacagaagatctcagcaaaggtttcagtttaatctacaagatttcaggtgttgtgctgtcttgggaagaggacattttggaaaggtgcttttagctgaatataaaaacacaaatgagatgtttgctataaaagccttaaagaaaggagatatngtggctcgagatgaagtagacagcctgatgtgtgaaaaaagaatttttgaaactgtgaatagtgtaaggcatccctttttggtgaacctttttgcatgtttccaaaccaaagagcatgtttgctttgtaatggaatatgctgccggtggggacctaatgatgcacattcatactgatgtcttttctgaaccaagagctgtattttatgctgcttgtgtagttcttgggttgcagtatttacatgaacacaaaattgtttatagagatttgaaattggataacttattgctagatacagagggctttgtgaaaattgctgattttggtctttgcaaagaaggaatgggatatggagatagaacaagcacattttgtggcactcctgaatttnnngccnnnnannnntnnnnagaaacttcttatacaagggctgtagattggnggngccttggcgtgcttatatatgaaatgcttgttggtgagtctccctttcctggtgatgatgaagaggaagttttntgacagtattgtaaatgatgaagtaaggtatccaaggnttcttatctacagaagccatttctataatgagaaggctgttaagaagaaatcctgaacggcgccttggggctagcgagaaagatgcagaggatgtaaaaaagcacccatttttccggctaattgattggagcgctctgatggacaaaaaagtaaagccaccatttatacctaccataagaggacgagaagatgttagtaattttgatgatgaatttacctcagaagcacctattctgactccacctcgagaaccaaggatactttcggaagaggagcaggaaatgttcagagattttgactacattgctgattggtgttaagttgctagacactgcgaaaccaagctgactcacaagaagacctcttaaaaatagcaacccttcatttgctctctgtgccaccaatagcttctgagttttttgttgttgttgtttttattgaaacacgtgaagatttgtttaaaagtaccattctaatacttcttcaaaagtggctcctcattgtacttcagcgtaaatatgagcactggaaacagtttcatggagtttaagttgagtgaacatcggccatgaaaatccatcacgaatacttttggatcaatagtctatttttaaaaanaaanaaaaaaaccacttttttatagtccctagctttgccatatgcccgccttaagtggaaggaaagttaatcacttaactatgttttataaaaagaaaaaagggcttggaatgctattactgttcacacaaagtatgattctgtttgaataaggcaaatgctccttttttnaaaaaaaaagacattactgtaatatcaaaaaccgtggcagtttgtatacaactcggggcttgattttttttaaaaaaacagaatgaattgatgtcttattttataaatgttctatatttattaggagnaaactttatattgccttttttatcaatcatgtaacaggcttatagctttccaacagagctgcttgccaaacaatttttttngtttattaaacagtgctgaaacaaacaggatcagcatttacttaagatgttaagaatgaggacttttaatcagccgaaccaagatattgttacctgtatgcattcccaaagtctagatgctcagtatgttcagtcatatctttcagaatcagtgaaccgattaccctttttttggtattcactctacatctgccaacctagttcaccttggttttgtgtctgctgtagaagggaaccataacttggttaaaccgtagggattatcattgtatacatgctgtgaacatgtatatgtgcaagttttaatgtattctatgttgtaggcttattatttaattttaccacttcatcacttttgtacagtggccaagcagacacctcaaactccagcatttacattaagtgcatttgtacattttaggccactggatccagattttatattggcagttattgagggcaaaagcaatatattgtaacagaatgtataaatatttttgataaaacagtctatattttattaaaaaatgaattataacactaaagctgtacctcaaaagtctcaaaaataatttgatgaaatattttatacaactcttcaaaggatccgtctgtggctttttatactcttttagggttgtctttttacaaaccatgactttccacttgcctgtagtttttngttngtttnggttnggttngattttatatttttttctcctaatctatgactttatngttttttcttagtttagtaatagcatctttgatcctgtgcttagcatgttagggtcattatacctcaggaatagcaagctgttaagtaaccatactgaattaactatttaattacagtgagctcatctcttaaaaatngttcaggtgtaaatcttatgagaaacatgaaaaagcacactgatttatggagagttgagctaaaaacatttataaatatttgctgggatgttttagcatcttttcattgtactctgagaacaattaaaatngtccagagatcatttatattaccttccaaatngtttattacccaagatcctttgggagaaaatcttatagaatgggggaacaatatgtggtttaaagttattttaaaatgccagttaatttcctcggcaaaggacaatagaggaacttagcttaattgtctggctttaatttaaactgtgttaatacaacattaaaataaaacactaaatacttttgaggtacagtctgctcacttttttggttctcaaatagcaaagaaagtaatgtctaaaataggctcttagcattaaaaactgacagcatttngtaactacacagtgtacagaatttttttttnaattgaagtcaatcactaaaaaaattagaaggcagggtctatttacacaattaagctgaagaaagcactaattttttgtagtttaaaatatatatatattttagtcagatttaaaattttaagctttatagagtgtaaatatattttgctattactgtatgtgtatgtgactgctcaagcactttgtaaagaaattaggatattttagaatggtacactatgcattcaaatgaaatgtgcctttcactatgtcattctaagaaaacaagtgttttttgcagtcataaattatcacaaatgcacaaattaaagtctatatagattgaaatttgtaannnnnnnnnnaannannctttccttttagaaacttcctaatgattaaaatatactttaacttttctgtgttcaaaatctcaaagactaattaactttaataaacattcttgcaagtaaaaaaaaaaaaaaaaaaaaaaaaaaaaaaaaaaaaaaaaaaaaaaaaaaaaaaga

SEQ ID NO: 28 - DNA, 1751 bp, Homo sapiens
  misc_feature: interleukin 1 receptor antagonist
  misc_feature (10)..(10): n is a, c, g, or t
  misc_feature (12)..(12): n is a, c, g, or t
  misc_feature (14)..(18): n is a, c, g, or t
  misc_feature (203)..(203): n is a, c, g, or t
  misc_feature (422)..(422): n is a, c, g, or t
  misc_feature (704)..(704): n is a, c, g, or t
  misc_feature (1530)..(1530): n is a, c, g, or t
  misc_feature (1716)..(1716): n is a, c, g, or t
  misc_feature (1724)..(1725): n is a, c, g, or t
  misc_feature (1732)..(1732): n is a, c, g, or t
  misc_feature (1739)..(1747): n is a, c, g, or t
atggcagtcnantnnnnngctgcagtcacagaatggaaatctgcagaggcctccgcagtcacctaatcactctcctcctcttcctgttccattcagagacgatctgccgaccctctgggagaaaatccagcaagatgcaagccttcagaatctgggatgttaaccagaagaccttctatctgaggaacaaccaactagttgcnggatacttgcaaggaccaaatgtcaatttagaagaaaagatagatgtggtacccattgagcctcatgctctgttcttgggaatccatggagggaagatgtgcctgtcctgtgtcaagtctggtgatgagaccagactccagctggaggcagttaacatcactgacctgagcgagaacagaaagcaggacaagcgcttcgccttcatccgctcagacagnggccccaccaccagttttgagtctgccgcctgccccggttggttcctctgcacagcgatggaagctgaccagcccgtcagcctcaccaatatgcctgacgaaggcgtcatggtcaccaaattctacttccaggaggacgagtagtactgcccaggcctgcctgttcccattcttgcatggcaaggactgcagggactgccagtccccctgccccagggctcccggctatgggggcactgaggaccagccattgaggggtggaccctcagaaggcgtcacaanaacctggtcacaggactctgcctcctcttcaactgaccagcctccatgctgcctccagaatggtctttctaatgtgtgaatcagagcacagcagcccctgcacaaagcccttccatgtcgcctctgcattcaggatcaaaccccgaccacctgcccaacctgctctcctcttgccactgcctcttcctccctcattccaccttcccatgccctggatccatcaggccacttgatgacccccaaccaagtggctcccacaccctgttttacaaaaaagaaaagaccagtccatgagggaggtttttaagggtttgtggaaaatgaaaattaggatttcatgatttttttttttcagtccccgtgaaggagagcccttcatttggagattatgttctttcggggagaggctgaggacttaaaatattcctgcatttgtgaaatgatggtgaaagtaagtggtagcttttcccttctttttcttctttttttgtgatgtcccaacttgtaaaaattaaaagttatggtactatgttagccccataattttttttttccttttaaaacacttccataatctggactcctctgtccaggcactgctgcccagcctccaagctccatctccactccagattttttacagctgcctgcagtactttacctcctatcagaagtttctcagctcccaaggctctgagcaaatgtggctcctgggggttctttcttcctctgctgaaggaataaattgctccttgacattgtagagcttctggcacttggagacttgtatgaaagatggctgtgcctctgcctgtctcccccaccnggctgggagctctgcagagcaggaaacatgactcgtatatgtctcaggtccctgcagggccaagcacctagcctcgctcttggcaggtactcagcgaatgaatgctgtatatgttgggtgcaaagttccctacttcctgtgacttcagctctgttttacaataaaatcttgaaaatgcctaaaaanaaaaaaannaaaaacnggaatcnnnnnnnnnattc

SEQ ID NO: 29 - DNA, 1368 bp, Homo sapiens
  misc_feature: chemokine (C-C motif) ligand 8
atccattgtgctctaaagtgatggagagcaccagcaaagccttagggcccatccctggcctcctgttacccacagaggggtaggcccttggctctcttccactatgacgtcagcttccattcttcctttcttatagacaattttccatttcaaggaaatcagagcccttaatagttcagtgaggtcactttgctgagcacaatcccatacccttcagcctctgctccacagagcctaagcaaaagatagaaactcacaacttccttgttttgttatctggaaattatcccaggatctggtgcttactcagcatattcaaggaaggtcttacttcattcttccttgattgtgaccatgcccaggctctctgctccctataaaaggcaggcagagccaccgaggagcagagaggttgagaacaacccagaaaccttcacctctcatgctgaagctcacacccttgccctccaagatgaaggtttctgcagcgcttctgtgcctgctgctcatggcagccactttcagccctcagggacttgctcagccagattcagtttccattccaatcacctgctgctttaacgtgatcaataggaaaattcctatccagaggctggagagctacacaagaatcaccaacatccaatgtcccaaggaagctgtgatcttcaagaccaaacggggcaaggaggtctgtgctgaccccaaggagagatgggtcagggattccatgaagcatctggaccaaatatttcaaaatctgaagccatgagccttcatacatggactgagagtcagagcttgaagaaaagcttatttattttccccaacctcccccaggtgcagtgtgacattattttattataacatccacaaagagattatttttaaataatttaaagcataatatttcttaaaaagtatttaattatatttaagttgttgatgttttaactctatctgtcatacatcctagtgaatgtaaaatgcaaaatcctggtgatgtgttttttgtttttgttttcctgtgagctcaactaagttcacggcaaaatgtcattgttctccctcctacctgtctgtagtgttgtggggtcctcccatggatcatcaaggtgaaacactttggtattctttggcaatcagtgctcctgtaagtcaaatgtgtgctttgtactgctgttgttgaaattgatgttactgtatataactatggaattttgaaaaaaaatttcaaaaagaaaaaaatatatataatttaaaactaaaaaaaaaaaaaaaaaaaaaaaaaaaaaaaaaaaaaaaaaaaaaaaaaaaaaaaaaaaaaaaaaaaaaaaaaaaaaaaaaaaaaaaaaaaaaaaaaaaaaa

SEQ ID NO: 30 - DNA, 1621 bp, Homo sapiens
  misc_feature: interferon-induced protein 44
  misc_feature (677)..(678): n is a, c, g, or t
  misc_feature (699)..(699): n is a, c, g, or t
  misc_feature (701)..(701): n is a, c, g, or t
  misc_feature (713)..(713): n is a, c, g, or t
  misc_feature (836)..(836): n is a, c, g, or t
  misc_feature (840)..(840): n is a, c, g, or t
  misc_feature (854)..(854): n is a, c, g, or t
  misc_feature (1077)..(1077): n is a, c, g, or t
  misc_feature (1445)..(1445): n is a, c, g, or t
  misc_feature (1465)..(1465): n is a, c, g, or t
  misc_feature (1467)..(1468): n is a, c, g, or t
  misc_feature (1481)..(1481): n is a, c, g, or t
  misc_feature (1483)..(1483): n is a, c, g, or t
  misc_feature (1490)..(1490): n is a, c, g, or t
  misc_feature (1534)..(1534): n is a, c, g, or t
gcatttgtgcctgcctagctatccagacagagcagctaccctcagctctagctgatactacagacagtacaacagatcaagaagtatggcagtgacaactcgtttgacatggttgcacgaaaagatcctgcaaaatcattttggagggaagcggcttagccttctctataagggtagtgtccatggattccgtaatggagttttgcttgacagatgttgtaatcaagggcctactctaacagtgatttatagtgaagatcatattattggagcatatgcagaagagagttaccaggaaggaaagtatgcttccatcatcctttttgcacttcaagatactaaaatttcagaatggaaactaggactatgtacaccagaaacactgttttgttgtgatgttacaaaatataactccccaactaatttccagatagatggaagaaatagaaaagtgattatggacttaaagacaatggaaaatcttggacttgctcaaaattgtactatctctattcaggattatgaagtttttcgatgcgaagattcactggatgaaagaaagataaaaggggtcattgagctcaggaagagcttactgtctgccttgagaacttatgaaccatatggatccctggttcaacaaatacgaattctgctgctgggtccaattggagctnngaagtccagctttttcaactnantgaggtctgttntccaagggcatgtaacgcatcaggctttggtgggcactaatacaactgggatatctgagaagtataggacatactctattagagacgggaaagatggcaaatacctgccgtttattctgtgtnactnactggggctgagtnagaaagaaggcggcctgtgcagggatgacatattctatatcttgaacggtaacattcgtgatagataccagtttaatcccatggaatcaatcaaattaaatcatcatgactacattgattccccatcgctgaaggacagaattcattgtgtggcatttgtatttgatgccagctctattcaatacttctcctctcagatgatagtaaagatcaaaagaattcnaagggagttggtaaacgctggtgtggtacatgtggctttgctcactcatgtggatagcatggatttgattacaaaaggtgaccttatagaaatagagagatgtgagcctgtgaggtccaagctagaggaagtccaaagaaaacttggatttgctctttctgacatctcggtggttagcaattattcctctgagtgggagctggaccctgtaaaggatgttctaattctttctgctctgagacgaatgctatgggctgcagatgacttcttagaggatttgccttttgagcaaatagggaatctaagggaggaaattatcaactgtgcacaaggaaaaaaatagatatgtgaaaggttcacgtaaattncctcacatcacagaagattnannttcagaaaggagnanacacagnccaaagagaagtatctaagaccaaagggatgtgttaaattaatntctaagatgaaaaaatgcatagaacattgtagtacttgtaaataactaaaaataacataatttaataataattataaaaaataataa

SEQ ID NO: 31 - DNA, 661 bp, Homo sapiens
  misc_feature: chemokine (C-C motif) ligand 2
tcaaactgaagctcgcactctcgcctccagcatgaaagtctctgccgcccttctgtgcctgctgctcatagcagccaccttcattccccaagggctcgctcagccagatgcaatcaatgccccagtcacctgctgctataacttcaccaataggaagatctcagtgcagaggctcgcgagctatagaagaatcaccagcagcaagtgtcccaaagaagctgtgatcttcaagaccattgtggccaaggagatctgtgctgaccccaagcagaagtgggttcaggattccatggaccacctggacaagcaaacccaaactccgaagacttgaacactcactccacaacccaagaatctgcagctaacttattttcccctagctttccccagacatcctgttttattttattataatgaattttgtttgttgatgtgaaacattatgccttaagtaatgttaattcttatttaagttattgatgttttaagtttatctttcatggtactagtgttttttagatacagagacttggggaaattgcttttcctcttgaaccacagttctacccctgggatgttttgagggtctttgcaagaatcatttttttaacattccaatgcatttaatacaaagaattgctaaaatattattgtggaaatg

SEQ ID NO: 32 - DNA, 6270 bp, Homo sapiens
  misc_feature: 2'-5'-oligoadenylate synthetase 3
gccctgcttccccttgcacctgcgccgggcggccatggacttgtacagcaccccggccgctgcgctggacaggttcgtggccagaaggctgcagccgcggaaggagttcgtagagaaggcgcggcgcgctctgggcgccctggccgctgccctgagggagcgcgggggccgcctcggtgctgctgccccgcgggtgctgaaaactgtcaagggaggctcctcgggccggggcacagctctcaagggtggctgtgattctgaacttgtcatcttcctcgactgcttcaagagctatgtggaccagagggcccgccgtgcagagatcctcagtgagatgcgggcatcgctggaatcctggtggcagaacccagtccctggtctgagactcacgtttcctgagcagagcgtgcctggggccctgcagttccgcctgacatccgtagatcttgaggactggatggatgttagcctggtgcctgccttcaatgtcctgggtcaggccggctccgcggtcaaacccaagccacaagtctactctaccctcctcaacagtggctgccaagggggcgagcatgcggcctgcttcacagagctgcggaggaactttgtgaacattcgcccagccaagttgaagaacctaatcttgctggtgaagcactggtaccaccaggtgtgcctacaggggttgtggaaggagacgctgcccccggtctatgccctggaattgctgaccatcttcgcctgggagcagggctgtaagaaggatgctttcagcctaggcgaaggcctccgaactgtcctgggcctgatccaacagcatcagcacctgtgtgttttctggactgtcaactatggcttcgaggaccctgcagttgggcagttcttgcagcggcacgttaagagacccaggcctgtgatcctggacccagctgaccccacatgggacctggggaatggggcagcctggcactgggatttgcatgcccaggaggcagcatcctgctatgaccacccatgctttctgagggggatgggggacccagtgcagtcttggaaggggccgggccttccacgtgctggatgctcaggtttgggccaccccatccagctagaccctaaccagaagacccctgaaaacagcaagagcctcaatgctgtgtacccaagagcagggagcaaacctccctcatgcccagctcctggccccactgcggagccagcatcgtacccctctgtgccgggaatggccttggacctgtctcagatccccaccaaggagctggaccgcttcatccaggaccacctgaagccgagcccccagttccaggagcaggtgaaaaaggccatcgacatcatcttgcgctgcctccatgagaactgtgttcacaaggcctcaagagtcagtaaagggggctcatttggccggggcacagacctaagggatggctgtgatgttgaactcatcatcttcctcaactgcttcacggactacaaggaccaggggccccgccgcgcagagatccttgatgagatgcgagcgcacgtagaatcctggtggcaggaccaggtgcccagcctgagccttcagtttcctgagcagaatgtgcctgaggctctgcagttccagctggtgtccacagccctgaagagctggacggatgttagcctgctgcctgccttcgatgctgtggggcagctcagttctggcaccaaaccaaatccccaggtctactcgaggctcctcaccagtggctgccaggagggcgagcataaggcctgcttcgcagagctgcggaggaacttcatgaacattcgccctgtcaagctgaagaacctgattctgctggtgaagcactggtaccgccaggttgcggctcagaacaaaggaaaaggaccagcccctgcctctctgcccccagcctatgccctggagctcctcaccatctttgcctgggagcagggctgcaggcaggattgtttcaacatggcccaaggcttccggacggtgctggggctcgtgcaacagcatcagcagctctgtgtctactggacggtcaactatagcactgaggacccagccatgagaatgcaccttcttggccagcttcgaaaacccagacccctggtcctggaccccgctgatcccacctggaacgtgggccacggtagctgggagctgttggcccaggaagcagcagcgctggggatgcaggcctgctttctgagtagagacgggacatctgtgcagccctgggatgtgatgccagccctcctttaccaaaccccagctggggaccttgacaagttcatcagtgaatttctccagcccaaccgccagttcctggcccaggtgaacaaggccgttgataccatctgttcatttttgaaggaaaactgcttccggaattctcccatcaaagtgatcaaggtggtcaagggtggctcttcagccaaaggcacagctctgcgaggccgctcagatgccgacctcgtggtgttcctcagctgcttcagccagttcactgagcagggcaacaagcgggccgagatcatctccgagatccgagcccagctggaggcatgtcaacaggagcggcagttcgaggtcaagtttgaagtctccaaatgggagaatccccgcgtgctgagcttctcactgacatcccagacgatgctggaccagagtgtggactttgatgtgctgccagcctttgacgccctaggccagctggtctctggctccaggcccagctctcaagtctacgtcgacctcatccacagctacagcaatgcgggcgagtactccacctgcttcacagagctacaacgggacttcatcatctctcgccctaccaagctgaagagcctgatccggctggtgaagcactggtaccagcagtgtaccaagatctccaaggggagaggctccctacccccacagcacgggctggaactcctgactgtgtatgcctgggagcagggcgggaaggactcccagttcaacatggctgagggcttccgcacggtcctggagctggtcacccagtaccgccagctctgtatctactggaccatcaactacaacgccaaggacaagactgttggagacttcctgaaacagcagcttcagaagcccaggcctatcatcctggatccggctgacccgacaggcaacctgggccacaatgcccgctgggacctgctggccaaggaagctgcagcctgcacatctgccctgtgctgcatgggacggaatggcatccccatccagccatggccagtgaaggctgctgtgtgaagttgagaaaatcagcggtcctactggatgaagagaagatggacaccagccctcagcatgaggaaattcagggtcccctaccagatgagagagattgtgtacatgtgtgtgtgagcacatgtgtgcatgtgtgtgcacacgtgtgcatgtgtgtgttttagtgaatctgctctcccagctcacacactcccctgcctcccatggcttacacactaggatccagactccatggtttgacaccagcctgcgtttgcagcttctctgtcacttccatgactctatcctcataccaccactgctgcttcccacccagctgagaatgccccctcctccctgactcctctctgcccatgcaaattagctcacatctttcctcctgctgcaatccatcccttcctcccattggcctctccttgccaaatctaaatactttatatagggatggcagagagttcccatctcatctgtcagccacagtcatttggtactggctacctggagccttatcttctgaagggttttaaagaatggccaattagctgagaagaattatctaatcaattagtgatgtctgccatggatgcagtagaggaaagtggtggtacaagtgccatgattgattagcaatgtctgcactggatatggaaaaaagaaggtgcttgcaggtttacagtgtatatgtgggctattgaagagccctctgagctcggttgctagcaggagagcatgcccatattggcttactttgtctgccacagacacagacagagggagttgggacatgcatgctatggggaccctcttgttggacacctaattggatgcctcttcatgagaggcctccttttcttcaccttttatgctgcactcctcccctagtttacacatcttgatgctgtggctcagtttgccttcctgaatttttattgggtccctgttttctctcctaacatgctgagattctgcatccccacagcctaaactgagccagtggccaaacaaccgtgctcagcctgtttctctctgccctctagagcaaggcccaccaggtccatccaggaggctctcctgacctcaagtccaacaacagtgtccacactagtcaaggttcagcccagaaaacagaaagcactctaggaatcttaggcagaaagggattttatctaaatcactggaaaggctggaggagcagaaggcagaggccaccactggactattggtttcaatattagaccactgtagccgaatcagaggccagagagcagccactgctactgctaatgccaccactacccctgccatcactgccccacatggacaaaactggagtcgagacctaggttagattcctgcaaccacaaacatccatcagggatggccagctgccagagctgcgggaagacggatcccacctccctttcttagcagaatctaaattacagccagacctctggctgcagaggagtctgagacatgtatgattgaatgggtgccaagtgccagggggcggagtccccagcagatgcatcctggccatctgttgcgtggatgagggagtgggtctatctcagaggaaggaacaggaaacaaagaaaggaagccactgaacatcccttctctgctccacaggagtgtcttagacagcctgactctccacaaaccactgttaaaacttacctgctaggaatgctagattgaatgggatgggaagagccttccctcattattgtcattcttggagagaggtgagcaaccaagggaagctcctctgattcacctagaacctgttctctgccgtctttggctcagcctacagagactagagtaggtgaagggacagaggacagggcttctaatacctgtgccatattgacagcctccatccctgtcccccatcttggtgctgaaccaacgctaagggcaccttcttagactcacctcatcgatactgcctggtaatccaaagctagaactctcaggaccccaaactccacctcttggattggccctggctgctgccacacacatatccaagagctcagggccagttctggtgggcagcagagacctgctctgccaagttgtccagcagcagagtggccctggcctgggcatcacaagccagtgatgctcctgggaagaccaggtggcaggtcgcagttgggtaccttccattcccaccacacagactctgggcctccccgcaaaatggctccagaattagagtaattatgagatggtgggaaccagagcaactcaggtgcatgatacaaggagaggttgtcatctgggtagggcagagaggagggcttgctcatctgaacaggggtgtatttcattccaggccctcagtctttggcaatggccaccctggtgttggcatattggccccactgtaacttttgggggcttcccggtctagccacaccctcggatggaaagacttgactgcataaagatgtcagttctccctgagttgattgataggcttaatggtcaccctaaaaacacccacatatgcttttcgatggaaccagataagttgacgctaaagttcttatggaaaaatacacacgcaatagctaggaaaacacagggaaagaagagttctgagcagggcctagtcttagccaatattaaaacatactatgaagcctctgatacttaaacagcatggcgctggtacgtaaatagaccaatgcagttaggtggctctttccaagactctggggaaaaaagtagtaaaaagctaaatgcaatcaatcagcaattgaaagctaagtgagagagccagagggcctccttggtggtaaaagagggttgcatttcttgcagccagaaggcagagaaagtgaagaccaagtccagaactgaatcctaagaaatgcaggactgcaaagaaattggtgtgtgtgtgtgtgtgtgtgtgtgtgtgtgtttaatttttaaaaagtttttattcggaatccgcg

SEQ ID NO: 33 - DNA, 1924 bp, Homo sapiens
  misc_feature: ubiquitin specific protease 18
cgcccgggcaggttagaattcagcgaccgcttaattctaggctcagtcccgacgtggaactcagcagcggaggctggacgcttgcatggcgcttgagagattccatcgtgcctggctcacataagcgcttcctggaagtgaagtcgtgctgtcctgaacgcgggccaggcagctgcggcctgggggttttggagtgatcacgaatgagcaaggcgtttgggctcctgaggcaaatctgtcagtccatcctggctgagtcctcgcagtccccggcagatcttgaagaaaagaaggaagaagacagcaacatgaagagagagcagcccagagagcgtcccagggcctgggactaccctcatggcctggttggtttacacaacattggacagacctgctgccttaactccttgattcaggtgttcgtaatgaatgtggacttcaccaggatattgaagaggatcacggtgcccaggggagctgacgagcagaggagaagcgtccctttccagatgcttctgctgctggagaagatgcaggacagccggcagaaagcagtgcggcccctggagctggcctactgcctgcagaagtgcaacgtgcccttgtttgtccaacatgatgctgcccaactgtacctcaaactctggaacctgattaaggaccagatcactgatgtgcacttggtggagagactgcaggccctgtatacgatccgggtgaaggactccttgatttgcgttgactgtgccatggagagtagcagaaacagcagcatgctcaccctcccactttctctttttgatgtggactcaaagcccctgaagacactggaggacgccctgcactgcttcttccagcccagggagttatcaagcaaaagcaagtgcttctgtgagaactgtgggaagaagacccgtgggaaacaggtcttgaagctgacccatttgccccagaccctgacaatccacctcatgcgattctccatcaggaattcacagacgagaaagatctgccactccctgtacttcccccagagcttggatttcagccagatccttccaatgaagcgagagtcttgtgatgctgaggagcagtctggagggcagtatgagctttttgctgtgattgcgcacgtgggaatggcagactccggtcattactgtgtctacatccggaatgctgtggatggaaaatggtcttgcttcaatgactccaatatttgcttggtgtcctgggaagacatccagtgtacctacggaaatcctaactaccactggcaggaaactgcatatcttctggtttacatgaagatggagtgctaatggaaatgcccaaaaccttcagagattgacacgctgtcattttccatttccgttcctggatctacggagtcttctaagagattttgcaatgaggagaagcattgttttcaaactatataactgaccttatttataattagggatattatcaaaatatgtaaccatgaggcccctcaggtcctgatcagtcagaatggatgctttcaccagcagacccggccatgtggctgctcggtcctgggtgctcgctgctgtgcaagacattagccctttagttatgagcctgtgggaacttcaggggttcccagtggggagagcagtggcagtgggaggcatctgggggccaaaggtcagtggcagggggtatttcagtattatacaactgctgtgaccagacttgtatactggctgaatatcagtgctgtttgtaatttttcactttgagaaccaacattaattccatatgaatcaagtgttttgtaactgctattcatttattcagcaaatatttattgagcatctcttctccataagatagtgtgataaacacggtcatgaataaagttattttccccgaaaaaaaaaaaaaaaaaaaaaaaaaa

SEQ ID NO: 34 - DNA, 3502 bp, Homo sapiens
  misc_feature: hect domain and RLD 5
gcgcgcagctggttcccgctctgcagcgcaacgcctgaggcagtgggcgcgctcagtcccgggaccaggcgttctctcctctcgcctctgggcctgggacccgcaaagcggcgatggagcggaggtcgcggaggaagtcgcggcgcaacgggcgctcgaccgcgggcaaggccgccgcgacccagcccgcgaagtctccgggcgcacagctctggctctttcccagcgccgcgggcctccaccgcgcgctgctccggagggtggaggtgacgcgccaactctgctgctcgccggggcgcctcgcggtcttggaacgcggcggggcgggcgtccaggttcaccagctgctcgccgggagcggcggcgcccggacgccgaaatgcattaaattaggaaaaaacatgaagatacattccgtggaccaaggagcagagcacatgctgattctctcatcagatggaaaaccatttgagtatgacaactatagcatgaaacatctaaggtttgaaagcattttacaagaaaaaaaaataattcagatcacatgtggagattaccattctcttgcactctcaaaaggcggtgagctttttgcctggggacagaacctgcatgggcagcttggagttggaaggaaatttccctcaaccaccacaccacagattgtggagcacctcgcaggagtacccttggctcagatttctgccggagaagcccacagcatggccttatccatgtctggcaacatttattcatggggaaaaaatgaatgtggacaactaggcctgggccacactgagagtaaagatgatccatcccttattgaaggactagacaatcagaaagttgaatttgtcgcttgtggtggctctcacagtgccctactcacacaggatgggctgctgtttactttcggtgctggaaaacatgggcaacttggtcataattcaacacagaatgagctaagaccctgtttggtggctgagcttgttgggtatagagtgactcagatagcatgtggaaggtggcacacacttgcctatgtttctgatttgggaaaggtcttttcctttggttctggaaaagatggacaactgggaaatggtggaacacgtgaccagctgatgccgcttccagtgaaagtatcatcaagtgaagaactcaaacttgaaagccatacctcagaaaaggagttaataatgattgctggagggaatcaaagcattttgctctggataaagaaagagaattcatatgttaatctgaagaggacaattcctactctgaatgaagggactgtaaagagatggattgctgatgtggagactaaacggtggcagagcacaaaaagggaaatccaagagatattttcatctcctgcttgtctaactggaagttttttaaggaaaagaagaactacagaaatgatgcctgtttatttggacttaaataaagcaagaaacatcttcagggagttaacccaaaaggactggattactaacatgataaccacctgcctcaaagataatctgctcaaaagacttccatttcattctccaccccaagaagctttagaaattttcttccttctcccagaatgtcctgtgatgcatatttccaacaactgggagagccttgtggttccatttgcaaaggttgtttgtaaaatgagtgaccagtcttcactggttctggaagagtattgggcaactctgcaagaatccactttcagcaaactggtccagatgtttaaaacagccgtcatatgccagttggattactgggatgaaagtgctgaggagaatggtaatgttcaagctctcctagaaatgttgaagaagctgcacagggtaaaccaggtgaaatgtcaactacctgaaagtattttccaagtagacgaactcttgcaccgtctcaatttttttgtagaagtatgcagaaggtacttgtggaaaatgactgtggacgcttcagaaaatgtacaatgctgcgtcatattcagtcactttccatttatctttaataatctgtcgaaaattaaactactacatacagacacacttttaaaaatagagagtaaaaaacataaagcttatcttaggtcggcagcaattgaggaagaaagagagtctgaattcgctttgaggcccacgtttgatctaacagtcagaaggaatcacttgattgaggatgttttgaatcagctaagtcaatttgagaatgaagacctgaggaaagagttatgggtttcatttagtggagaaattgggtatgacctcggaggagtcaagaaagagttcttctactgtctgtttgcagagatgatccagccggaatatgggatgttcatgtatcctgaaggggcttcctgcatgtggtttcctgtcaagcctaaatttgagaagaaaagatacttcttttttggggttctatgtggactttccctgttcaattgcaatgttgccaacctccctttcccactggcactgtttaagaaacttttggaccaaatgccatcattggaagacttgaaagaactcagtcctgatttgggaaagaatttgcaaacacttctggatgatgaaggtgataactttgaggaagtattttacatccattttaatgtgcactgggacagaaacgacacaaacttaattcctaatggaagtagcataactgtcaaccagactaacaagagagactatgtttctaagtatatcaattacattttcaacgactctgtaaaggcggtttatgaagaatttcggagaggattttataaaatgtgcgacgaagacattatcaaattattccaccccgaagaactgaaggatgtgattgttggaaatacagattatgattggaaaacatttgaaaagaatgcacgttatgaaccaggatataacagttcacatcccaccatagtgatgttttggaaggctttccacaaattgactctggaagaaaagaaaaaattccttgtatttcttacaggaactgacagactacaaatgaaagatttaaataatatgaaaataacattttgctgtcctgaaagttggaatgaaagagaccctataagagcactgacatgtttcagtgtcctcttcctccctaaatattctacaatggaaacagttgaagaagcgcttcaagaagccatcaacaacaacagaggatttggctgaccagcttgcttgtccaacagccttattttgttgttgttatcgttgttgttgttgttgttgttgttgtttctctactttgttttgttttaggcttttagcagcctgaagccatggtttttcatttctgtctctagtgataagcaggaaagagggatgaagaagagggtttactggccggttagaacccgtgactgtattctctcccttggatacccctatgcctacatcatattccttacctcttttgggaaatatttttcaaaaataaaataaccgaaaaactaaaaaaagaaaaaaaaaaaaaaaaaaaaaaa

SEQ ID NO: 35 - DNA, 1507 bp, Homo sapiens
  misc_feature: BCR downstream signaling 1
aaacagttgccttttcctctcacagaaggaagatttcattttgtttgagacgagaaaccaaaccacacaccaaagagaggggtatgatggctaagaagcccccaaaaccagcccctcgcaggatcttccaggaaaggttaaagattactgctctacctttgtactttgaaggttttttattaatcaagcggtcaggataccgggagtatgagcattactggacagagttgagaggaactactcttttcttttataccgacaaaaagagtataatatatgttgacaaattagacatagtagacctcacatgccttactgagcagaattcaactgaaaagaactgtgcgaaattcacccttgttttgccgaaagaggaagtacaactgaagacagagaacacagaaagtggggaagaatggagaggcttcattcttacagtaacagagctgtcagttccccaaaacgtgtcactcctacctgggcaagtaattaaactgcatgaagtcctagagagagaaaagaaaaggaggattgagacagagcagagtacgtccgtggaaaaagagaaggaaccaactgaagattatgtggatgtactgaaccctatgccagcatgtttttatacagtgtcccggaaagaggcaactgagatgctccagaagaacccttctttgggaaatatgatcctgaggcctggtagtgacagtagaaactactccatcactattcggcaggagatagacattccaagaatcaagcactacaaagtgatgagcgtaggacaaaactacactattgaactggaaaaacctgtaacactcccaaaccttttcagtgtcattgattattttgtgaaggagactcgaggaaatttaagaccatttatatgttcaactgatgaaaacactggtcaagaacccagtatggaagggagaagtgaaaagttgaagaaaaatccacacattgcatgaaatacaatgtgaaagctcctttgtatatcttggtaatttatattttcaaaacgaagttcttacttttaaagagaattacctatattctcctgatactgattaccaagtcattcacctgaacaccagaattagaattaaacattgtaccatacaatttcattatcttatcagaatgaaaccaattcacagggaaactagagactacggctgtggtggtaacctgcagatatacacattcccatgcactgacataagttgaaaacacatagtactttctagatggaatttttttctttaggcctcaatgaaatacatttcccctatataattccaacagcagtttctctagttctaaattttaccaattcccaaaaaacctaagttttgctgaaatctgatttgaccaatttatcaaatatgtcattttaattacctagctggaagttagagacatgaaatgtactagaggagcccttttccaatggaaatattatataccacattttttgttaatggaaataaatgtctccattccc

SEQ ID NO: 36 - DNA, 4525 bp, Homo sapiens
  misc_feature: cleavage and polyadenylation specific factor 1
  misc_feature (192)..(192): n is a, c, g, or t
  misc_feature (196)..(197): n is a, c, g, or t
  misc_feature (199)..(199): n is a, c, g, or t
  misc_feature (203)..(203): n is a, c, g, or t
  misc_feature (205)..(205): n is a, c, g, or t
  misc_feature (228)..(228): n is a, c, g, or t
  misc_feature (231)..(249): n is a, c, g, or t
  misc_feature (272)..(272): n is a, c, g, or t
  misc_feature (337)..(337): n is a, c, g, or t
  misc_feature (349)..(349): n is a, c, g, or t
  misc_feature (399)..(441): n is a, c, g, or t
  misc_feature (480)..(480): n is a, c, g, or t
  misc_feature (551)..(551): n is a, c, g, or t
  misc_feature (587)..(587): n is a, c, g, or t
  misc_feature (612)..(644): n is a, c, g, or t
  misc_feature (985)..(986): n is a, c, g, or t
  misc_feature (1044)..(1058): n is a, c, g, or t
  misc_feature (1151)..(1151): n is a, c, g, or t
  misc_feature (1211)..(1226): n is a, c, g, or t
  misc_feature (1562)..(1578): n is a, c, g, or t
  misc_feature (1890)..(1905): n is a, c, g, or t
  misc_feature (1907)..(1924): n is a, c, g, or t
  misc_feature (2040)..(2062): n is a, c, g, or t
  misc_feature (2461)..(2477): n is a, c, g, or t
  misc_feature (2747)..(2766): n is a, c, g, or t
  misc_feature (2823)..(2823): n is a, c, g, or t
  misc_feature (2825)..(2825): n is a, c, g, or t
  misc_feature (2829)..(2830): n is a, c, g, or t
  misc_feature (2844)..(2844): n is a, c, g, or t
  misc_feature (2897)..(2897): n is a, c, g, or t
  misc_feature (2974)..(2974): n is a, c, g, or t
  misc_feature (3148)..(3268): n is a, c, g, or t
  misc_feature (3283)..(3285): n is a, c, g, or t
  misc_feature (3296)..(3415): n is a, c, g, or t
  misc_feature (3417)..(3419): n is a, c, g, or t
  misc_feature (3431)..(3434): n is a, c, g, or t
  misc_feature (3472)..(3472): n is a, c, g, or t
  misc_feature (3480)..(3480): n is a, c, g, or t
  misc_feature (3483)..(3486): n is a, c, g, or t
  misc_feature (3490)..(3499): n is a, c, g, or t
  misc_feature (3502)..(3505): n is a, c, g, or t
  misc_feature (3535)..(3535): n is a, c, g, or t
  misc_feature (3555)..(3571): n is a, c, g, or t
  misc_feature (3577)..(3581): n is a, c, g, or t
  misc_feature (3585)..(3586): n is a, c, g, or t
  misc_feature (3588)..(3590): n is a, c, g, or t
  misc_feature (3592)..(3592): n is a, c, g, or t
  misc_feature (3600)..(3601): n is a, c, g, or t
  misc_feature (3603)..(3603): n is a, c, g, or t
  misc_feature (3605)..(3606): n is a, c, g, or t
  misc_feature (3610)..(3611): n is a, c, g, or t
  misc_feature (3632)..(3632): n is a, c, g, or t
  misc_feature (3648)..(3650): n is a, c, g, or t
  misc_feature (3673)..(3673): n is a, c, g, or t
  misc_feature (3676)..(3677): n is a, c, g, or t
  misc_feature (3679)..(3679): n is a, c, g, or t
  misc_feature (3682)..(3700): n is a, c, g, or t
  misc_feature (3704)..(3719): n is a, c, g, or t
  misc_feature (3746)..(3771): n is a, c, g, or t
  misc_feature (3971)..(4018): n is a, c, g, or t
  misc_feature (4028)..(4030): n is a, c, g, or t
  misc_feature (4093)..(4139): n is a, c, g, or t
  misc_feature (4153)..(4153): n is a, c, g, or t
  misc_feature (4164)..(4186): n is a, c, g, or t
  misc_feature (4401)..(4401): n is a, c, g, or t
  misc_feature (4404)..(4404): n is a, c, g, or t
ctgtcccggttcctctcgagtcggctccaactgccagcccgggttggcgccatgtacgccgtgtacaaacaggcgcatccgccacccggtctggagttctccatgtactgcaacttcttcaacaacagcgagcgcaacctggtagtggccgggacctcgcagctctacgtgtaccgcctcaaccgcgacgcngagnntntgancnagaatgacaggagcacagagggnaannnnnnnnnnnnnnnnnnngagcttgctgcctccttctcctnctttggcaacgtcatgtccatggccagcgtgcagctggcaggagccaagcgggatgccctgctcntaagcttcaagnatgccaagctgtctgtggtggagtacgacccgggcacccatgacctgaannnnnnnnnnnnnnnnnnnnnnnnnnnnnnnnnnnnnnnnnnngggtttgtgcagaatgtacacacgccgcgagtgcgggtnggaccccgacgggcgctgtgcagccatgcttgtctacggcacgcggctggtggtcctgcccttccgcaggnagagcctggctgaggagcacgaggggctcgtgggtnaggggcagaggtccagcttcctgcnnnnnnnnnnnnnnnnnnnnnnnnnnnnnnnnnagaagctgctcaacatcatcgacctgcagttcctgcatggctactacgagcctaccctcctcatcctgtttgagcccaaccagacctggcctgggcgcgtggccgtgcggcaggacacgtgctccattgtggccatctcactgaacatcacgcagaaggtgcaccccgtcatctggtccctcaccagcctgccctttgactgcacccaggctctggctgtgcccaagcccataggtggggtggtggtgtttgccgtcaactcgctgttgtacctgaaccagagcgtccccccgtatggcgtggctctcaacagcctcaccacaggaaccacggctttcccnnttcgcacccaggagggtgtgcggatcaccctggactgcgcccaggccaccttcatctnnnnnnnnnnnnnnntcatctccctcaagggcggcgagatctacgtgctgaccctcatcaccgacggcatgcgcagtgtccgagcgttccactttgacaaggcggccnccagcgtcctcaccaccagcatggtcaccatggagcccgggtacctgttcctgggttctnnnnnnnnnnnnnnnntcctcctcaagtacacggagaagctgcaggagcccccggccagtgctgtccgtgaggctgccgacaaggaagagcctccctcaaagaagaagcgagtggatgcgacggccggctggtcagctgcgggtaagtcggtgccgcaggatgaggtggacgagattgaagtgtacggcagcgaggcccagtcgggaacacagctggccacctactcctttgaggtgtgtgacagcatcctgaacattggaccctgtgccaatgccgccgtgggcgagcctgccttcctctctgaagagtttcagaacagccccgagccggacctggagattgtggtttgcnnnnnnnnnnnnnnnnncggggctttgtcggtgctgcagaagagcatccggccccaggtggtgacaacctttgagcttcccggctgctatgacatgtggacagtcatcgccccggtgcgtaaggaggaggaggacaatcccaagggggagggcacagagcaggaacccagcaccacccctgaagcagacgacgacggccgcagacacggattcctgattctgagccgggaagactccaccatgatcctgcagacggggcaggagatcatggagctggacaccagtggcttcgccactcagggccccacggtctttgctgggaacatcgnnnnnnnnnnnnnnnntnnnnnnnnnnnnnnnnnnggcatccgcctgctggaaggagtgaatcagctgcacttcatccccgtggacctgggcgcccccatcgtgcagtgcgccgtggccgacccctatgtggtcatcatgagtgccgaggnnnnnnnnnnnnnnnnnnnnnnnaagagtgactcctacggtggccgccaccaccgcctggcgctgcacaagcccccgctgcaccatcagtccaaggtgattacgctgtgcctgtaccgagacctcagcggcatgttcaccactgagagccgcctgggtggggcccgtgacgagctcgggggccgcagtggcccggaggccgagggcctgggctcagagactagccccacagtggatgacgaggaggagatgctgtatggggattcgggctccctcttcagccccagcaaggaggaggcccgaagaagcagccagccccctgctgaccgggaccctgcacccttccgggcagagcctacccactggtgcctgctggtgcgggagaatggcaccatggagatctaccagcttcccgactggcgnnnnnnnnnnnnnnnnnagaacttccctgtggggcagcgggtccttgtggacagctcctttggacagcccactacacagggcgaggcccgcagggaggaggccacgcgccagggggagctgcccctcgtcaaggaggtgctgctggtggcgctgggcagccgccagagcaggccctacctgctggtgcatgtggaccaagagctgcttatctacgaggccttcccccacgactctcagctcggccagggcaatctcaaagtccgctttaagaaggtccctcacaacnnnnnnnnnnnnnnnnnnnngccaaagccatccaagaagaaagcagaaggtggcggcgcagaggagggggctggggncngggnncgcgtggcgcgttntccgctacttcgaggatatttatggctactcaggggtcttcatctgcggcccntcccctcactggctcttggtgaccggccgaggggctctgcggctacaccccatggccatcgacggcccggtcgactntttcgctccattccacaatgtcaactgtccccgcggcttcctgtacttcaacagacagggcgagctgaggatcagtgtcctgcctgcctacctgtcctatgatgccccatggcctgtcaggaagatcccgctgcgctgcacggcccactatgtggcttaccacgtggagtctannnnnnnnnnnnnnnnnnnnnnnnnnnnnnnnnnnnnnnnnnnnnnnnnnnnnnnnnnnnnnnnnnnnnnnnnnnnnnnnnnnnnnnnnnnnnnnnnnnnnnnnnnnnnnnnnnnnnnnnnggccttctccatccnnngctcatctccnnnnnnnnnnnnnnnnnnnnnnnnnnnnnnnnnnnnnnnnnnnnnnnnnnnnnnnnnnnnnnnnnnnnnnnnnnnnnnnnnnnnnnnnnnnnnnnnnnnnnnnnnnnnnnnnnnnnnnnntnnnggcctcaaaggnnnnacgtggccgccgggacctgcctcatgcagggggaggangtcacgtnccnnnngggnnnnnnnnnnatnnnnatcatggatgtgattgaggtggtgcccgangcctggccagcccttgaccnnnnnnnnnnnnnnnnncctttnnnnnaagnngnnnanggggcccnngncnncccnntgtgccactgcaatggccacntggtgtcggccatcgnnnagaagattttcctgtggagcctncgnncnagnnnnnnnnnnnnnnnnnnnttcnnnnnnnnnnnnnnnnacatacaccagatgatcagcgtcaagnnnnnnnnnnnnnnnnnnnnnnnnnngaagagcatttcgctgctgcgctaccaggaggaaagcaagacgctgagcctggtgtcgcgggatgccaagcccctggaggtgtacagcgtggacttcatggtggacaatgcccagctgggttttctggtgtctgaccgcgaccgcaacctcatggtgtacatgtacctgcccgaagccaaggagagtttcgggggcatgnnnnnnnnnnnnnnnnnnnnnnnnnnnnnnnnnnnnnnnnnnnnnnnnttctggaggnnnccgtgccggggggccactgaagggctcagcaaaaagtcggtcgtgtgggagaataagcacatnnnnnnnnnnnnnnnnnnnnnnnnnnnnnnnnnnnnnnnnnnnnnnntgcaggagaagacntaccggcggcnnnnnnnnnnnnnnnnnnnnnnnaccaccatgctgccacaccacgccggcctcaacccccgcgccttccggatgctgcacgtggaccgccgcaccctccagaatgccgtgcgcaacgtgctggatggggagctgctcaaccgctacctgtacctgagcaccatggagcgcagcgagctagccaagaagatcggcaccacaccagacataatcctggacgacttgctggagacggaccncgntcaccgcccacttctagccccgtggatgccgtcaccaccagcacacggaactacctcccaccccctttttgtacaaaacacaaggaaaaacattttttgcttgaaaaaaaaaaaaaaaaaa

SEQ ID NO: 37 - DNA, 1204 bp, Homo sapiens
  misc_feature: Sialoadhesin
  misc_feature (32)..(34): n is a, c, g, or t
  misc_feature (145)..(164): n is a, c, g, or t
  misc_feature (498)..(498): n is a, c, g, or t
  misc_feature (571)..(571): n is a, c, g, or t
  misc_feature (638)..(638): n is a, c, g, or t
  misc_feature (832)..(832): n is a, c, g, or t
  misc_feature (837)..(837): n is a, c, g, or t
  misc_feature (844)..(844): n is a, c, g, or t
  misc_feature (848)..(848): n is a, c, g, or t
  misc_feature (851)..(852): n is a, c, g, or t
  misc_feature (861)..(861): n is a, c, g, or t
  misc_feature (869)..(869): n is a, c, g, or t
  misc_feature (887)..(887): n is a, c, g, or t
  misc_feature (896)..(896): n is a, c, g, or t
  misc_feature (902)..(902): n is a, c, g, or t
  misc_feature (905)..(905): n is a, c, g, or t
  misc_feature (917)..(917): n is a, c, g, or t
  misc_feature (933)..(933): n is a, c, g, or t
  misc_feature (938)..(938): n is a, c, g, or t
  misc_feature (986)..(986): n is a, c, g, or t
  misc_feature (990)..(990): n is a, c, g, or t
  misc_feature (1098)..(1099): n is a, c, g, or t
tttttttttttttttttttttttttttttttnnntcataggatggagttttattgggaggacattctggacgggctcccagcaagagtctggcaatggagcatgaaaatgaatgagcctggaatgagggagggtgcggcctcggnnnnnnnnnnnnnnnnnnnnccccaactgcctcccagcgtgttagctcctgtggcaactccccacttctctctctgtttttcaacccaaatcctagagcagagggctcttcgctcctcacaccatctccaccaggctgcagggggagtcactagcccactcaagagctctctcctgttggtccctgattcgcaggggcacgtcattccttcttggtaactcattctctttaacagcccgacacagggtctccaggaaaaggacaggagctcacacagtcatgaacagagatgcatctggagcaggaataaggatgctgacaacatctgtgtctgccctccactcttgtaagggncagtaaggtagtacccagtccctgggggtagggggggtggtggtgggaatgagggcatctcttctttcagggnccaaatctggcacaaggatgtctgcttaggcaactccactgcctggcatgctctctccctaggaaancaccaaaccttttttatttcctcagtcttagtgtgagagtgatcacctcttccaggaagcccacaaccagaatgccaggggcacaccctggccctcagtagatgggcactgagacaaaacatggcctgctggtggcattcccaacaatgtcaaaagtctcagggatgagctcacagttgggagtcctttggaangtccnaattccnaaantgnncctctgganctcaaaantaaaaactacatttcccnagtctcccnttgtangcnttgcagtagccnatgtgacaatactccnagccnaatgggaagtgagtggaaaagtcctgtgcagcttctgagttgcgtccnaccnatgggcatgggtgtgcttctacctccactcttccttcttctggctggagggcatgtggacaaagcggggccatggtgagcctcacaatcaaaggcatcattttagggnnagagaaaaggaagatagaaggatcctgagccccaacatcataaaccatcgtaacagccagactagcgtgggagagaaaaataaaattctatcatgttgaagtcac

SEQ ID NO: 38 - DNA, 1436 bp, Homo sapiens
  misc_feature: stathmin 1/oncoprotein 18
agtgtggtcaggcggctcggactgagcaggactttccttatcccagttgattgtgcagaatacactgcctatcgcttgtcttctattcaccatggcttcttctgatatccaggtgaaagaactggagaagcgtgcctcaggccaggcttttgagctgattctcagccctcggtcaaaagaatctgttccagaattccccctttcccctccaaagaagaaggatctttccctggaggaaattcagaagaaattagaagctgcagaagaaagacgcaagtcccatgaagctgaggtcttgaagcagctggctgagaaacgagagcacgagaaagaagtgcttcagaaggcaatagaagagaacaacaacttcagtaaaatggcagaagagaaactgacccacaaaatggaagctaataaagagaaccgagaggcacaaatggctgccaaactggaacgtttgcgagagaaggataagcacattgaagaagtgcggaagaacaaagaatccaaagaccctgctgacgagactgaagctgactaatttgttctgagaactgactttctccccatccccttcctaaatatccaaagactgtactggccagtgtcattttattttttccctcctgacaaatattttagaagctaatgtaggactgtataggtagatccagatccagactgtaagatgttgttttaggggctaaaggggagaaactgaaagtgttttactctttttctaaagtgttggtctttctaatgtagctatttttcttgttgcatcttttctacttcagtacacttggtgtactgggttaatggctagtactgtattggctctgtgaaaacatatttgtgaaaagagtatgtagtggcttcttttgaactgttagatgctgaatatctgttcacttttcaatcccaattctgtcccaatcttaccagatgctactggacttgaatggttaataaaactgcacagtgctgttggtggcagtgacttcttttgagttaggttaataaatcaagccatagagcccctcctggttgatacttgttccagatggggcctttggggctggtagaaatacccaacgcacaaatgaccgcacgttctctgccccgtttcttgccccagtgtggtttgcattgtctccttccacaatgactgctttgtttggatgcctcagcccaggtcagctgttactttctttcagatgtttatttgcaaacaaccattttttgttctgtgtcccttttaaaaggcagattaaaagcacaagcgtgtttctagagaacagttgagagagaatctcaagattctacttggtggtttgcttgctctacgttacaggtggggcatgtcctcatcctttcctgccataaaagctatgacacgagaatcagaatattaataaaactttatgtactgctgt

SEQ ID NO: 39 - DNA, 873 bp, Homo sapiens
  misc_feature: H2A histone family, member Z
cagtttgaatcgcggtgcgaccgaaggagtaggtgctgggatcgtcaccgtggcaccgattagccttttctctgccttgcttgcttgagcttcagcggaattcgaaatggctggcggtaaggctggaaaggactccggaaaggccaagacaaaggcggtttcccgctcgcagagagccggcttgcagttcccagtgggccgtattcatcgacacctaaaatctaggacgaccagtcatggacgtgtgggcgcgactgccgctgtgtacagcgcagccatcctggagtacctcaccgcagaggtacttgaactggcaggaaatgcatcaaaagacttaaaggtaaagcgtattacccctcgtcacttgcaacttgctattcgtggagatgaagaattggattctctcatcaaggctacaattgctggtggtggtgtcattccacacatccacaaatctctgattgggaagaaaggacaacagaagactgtctaaaggatgcctggattccttgttatctcaggactctaaatactctaacagctgtccagtgttggtgattccagtggactgtatctctgtgaaaaacacaattttgcctttttgtaattctatttgagcaagttggaagtttaattagctttccaaccaaccaaatttctgcattcgagtcttaaccatatttaagtgttactgtggcttcaaagaagctattgattctgaagtagtgggttttgattgagttgactgtttttaaaaaactgtttggattttaattgtgatgcagaagttatagtaacaaacatttggttttgttcagaccttatttccactctggtggataagttcaataaaggtcatatcccaaactaaaa

SEQ ID NO: 40 - DNA, 4248 bp, Homo sapiens
  misc_feature: 24-dehydrocholesterol reductase
cccgggctgtgggctacaggcgcagagcgggccaggcgcggagctggcggcagtgacaggaggcgcgaacccgcagcgcttaccgcgcggcgccgcaccatggagcccgccgtgtcgctggccgtgtgcgcgctgctcttcctgctgtgggtgcgcctgaaggggctggagttcgtgctcatccaccagcgctgggtgttcgtgtgcctcttcctcctgccgctctcgcttatcttcgatatctactactacgtgcgcgcctgggtggtgttcaagctcagcagcgctccgcgcctgcacgagcagcgcgtgcgggacatccagaagcaggtgcgggaatggaaggagcagggtagcaagaccttcatgtgcacggggcgccctggctggctcactgtctcactacgtgtcgggaagtacaagaagacacacaaaaacatcatgatcaacctgatggacattctggaagtggacaccaagaaacagattgtccgtgtggagcccttggtgaccatgggccaggtgactgccctgctgacctccattggctggactctccccgtgttgcctgagcttgatgacctcacagtggggggcttgatcatgggcacaggcatcgagtcatcatcccacaagtacggcctgttccaacacatctgcactgcttacgagctggtcctggctgatggcagctttgtgcgatgcactccgtccgaaaactcagacctgttctatgccgtaccctggtcctgtgggacgctgggtttcctggtggccgctgagatccgcatcatccctgccaagaagtacgtcaagctgcgtttcgagccagtgcggggcctggaggctatctgtgccaagttcacccacgagtcccagcggcaggagaaccacttcgtggaagggctgctctactccctggatgaggctgtcattatgacaggggtcatgacagatgaggcagagcccagcaagctgaatagcattggcaattactacaagccgtggttctttaagcatgtggagaactatctgaagacaaaccgagagggcctggagtacattcccttgagacactactaccaccgccacacgcgcagcatcttctgggagctccaggacatcatcccctttggcaacaaccccatcttccgctacctctttggctggatggtgcctcccaagatctccctcctgaagctgacccagggtgagaccctgcgcaagctgtacgagcagcaccacgtggtgcaggacatgctggtgcccatgaagtgcctgcagcaggccctgcacaccttccaaaacgacatccacgtctaccccatctggctgtgtccgttcatcctgcccagccagccaggcctagtgcaccccaaaggaaatgaggcagagctctacatcgacattggagcatatggggagccgcgtgtgaaacactttgaagccaggtcctgcatgaggcagctggagaagtttgtccgcagcgtgcatggcttccagatgctgtatgccgactgctacatgaaccgggaggagttctgggagatgtttgatggctccttgtaccacaagctgcgagagaagctgggttgccaggacgccttccccgaggtgtacgacaagatctgcaaggccgccaggcactgagctggagcccgcctggagagacagacacgtgtgagtggtcaggcatcttcccttcactcaagcttggctgctttcctagatccacactttcaaagagaaacccctccagaactcccaccctgacagcccaacaccaccttcctcctggcttccagggggcagcccagtggaatggaaagaatgtgggatttggagtcagacaagcctgagtccagttccccgtttagaactcattagctgtgtgactctgggtgagtcccttaacccctctgagcccgggtctcttcattagttgaaagggatagtaatacctacttgcaggttgttgtcatctgagttgagcactggtcacattgaaggtgctgggtaagtggtagctcttgttgcttcccgttcagcgtcacatctgcagtggagcctgaaaaggctccacattaggtcacctgtgcacagccatggctggaatgatgaaggggatacgctggagttgccctgccatcgcctccatcagccagacgaggtcctcacaggagaaggacagctcttccccaccctgggatctcaggagggcagccacggagtggggaggccccagatgcgctgtgccaaagccaggtccgaggccaaagttctccctgccatccttggtgccgtcctgccccttcctccttcatgcctgggcctgcaggcccaccccagccaccactgagtccactcggagtgccctgtgttcctggagaaggcattccagggttgaatcttgtcccagcctcagcctgggacacctaggtggagagagtggtctccgctctgaattggatccaggggacctgggctcattcttcttggctcaccaaccctgcaggcctcatctttcccaaaacccactttgtcttggtgggagtgggtccgcgctgctctgcagcaggggctggggagtggacagcatcaggtgggaaagtggagtccaccctcatgtttctgtaggattctcaccgtggggctggaagaaaagagcatcgacttgatttctccaaccactcatccctctttttctttcttccaccactccccaccccagctgtagttaatttcagtgccttacaaatcctaagctcagagaaagttccatttccgttccagagggaagggaacctccctaggtccttccctggcttgttataacgcaaagcttggttgtttatgcaactctatcttaagaactgcccagcctcagctgaaaacccgaatctgagaaggaattgcgtcatgtaagggaagctggaattaagggagctgagccagtcatggttgtggcgtgtgagtcaggagacctaggtttcagcccctctctactgtcagcgagctgtgcaacgtgggcaagtcattgtcctctgagctgcagtttcctcatctgtcacatcgctacagacaagacctccctggaacccttctgattgtcttagacactgtggttgcaaaacccacggaaagcctcatttgtgtggaaagtcagaggaaaaatgatccagtggacacttggggattatctgtcattcaagatccttccttcaaccccaaggccagctcccatctcatttccagaaaggctcatacctggcttgcagggaagcatctgtcttgtcattccaggtgccagaatcctctcagagtcattgaagggtgttcacccatcccacccaaggcttggcacactgccagtgtcttagcagggtcttgtgagggctgggggcatccaggcactcagaaggcaaaggaaccaccctacccatttggcctctggagggggcagaagaaagaaagaaacctcatcctatattttacaaagcatgtgaattctggcattagctctcataggagacccatgtgcttccttgctcagtgcaaaactgatgattctacttgctgtagatgaatggttaacacgagctagttaaacagtgccattgttttgccagtgaagcctccaaccctaagccactgggacggtggccagagatgccagcagcctctgtcgcccttagtcatataaccaaaatccagaccttatccacaacccggggcttggaaaggaaggtattttggaatcacaccctccggttatgttgctccagtaaaatcttgcctggaaagaggcagtcttcttagcatggtgagctgagttcatggcttttttttgtagccagtcctgtccctggccatccatgtgatggttttggatggagttaaacttgatgccagtgggcagtgcatgtggaaagtatcagagtaagcctctcccctccagagccctgagtttcttggctgcatgaaggttttctttagaatcagaattgtagccagtttctttggccagaaggatgaatacttggatattactgaaagggaggggtggagatgggtgtggcagtgtatggtgtgtgatttttattttcttctttggtcatgggggccaaggagaaaggcatgaatcttccctgtcaggctcttacagccacaggcactgtgtctactgtctggaagacatgtccccgtggctgtggggccgctgcttctgtttaaataaaagtggcctgg

SEQ ID NO: 41 - DNA, 1192 bp, Homo sapiens
  misc_feature: CD9 antigen (p24)
cgcgccccccagtcccgcacccgttcggcccaggctaagttagccctcaccatgccggtcaaaggaggcaccaagtgcatcaaatacctgctgttcggatttaacttcatcttctggcttgccgggattgctgtccttgccattggactatggctccgattcgactctcagaccaagagcatcttcgagcaagaaactaataataataattccagcttctacacaggagtctatattctgatcggagccggcgccctcatgatgctggtgggcttcctgggctgctgcggggctgtgcaggagtcccagtgcatgctgggactgttcttcggcttcctcttggtgatattcgccattgaaatagctgcggccatctggggatattcccacaaggatgaggtgattaaggaagtccaggagttttacaaggacacctacaacaagctgaaaaccaaggatgagccccagcgggaaacgctgaaagccatccactatgcgttgaactgctgtggtttggctgggggcgtggaacagtttatctcagacatctgccccaagaaggacgtactcgaaaccttcaccgtgaagtcctgtcctgatgccatcaaagaggtcttcgacaataaattccacatcatcggcgcagtgggcatcggcattgccgtggtcatgatatttggcatgatcttcagtatgatcttgtgctgtgctatccgcaggaaccgcgagatggtctagagtcagcttacatccctgagcaggaaagtttacccatgaagattggtgggattttttgtttgtttgttttgttttgtttgttgtttgttgtttgtttttttgccactaattttagtattcattctgcattgctagataaaagctgaagttactttatgtttgtcttttaatgcttcattcaatattgacatttgtagttgagcggggggtttggtttgcttggtttatatttttcagttgtttgtttttgcttgttatattaagcagaaatcctgcaatgaaaggtactatatttgctagactctagacaagatattgtacataaaagaatttttttgtctttaaatagatacaaatgtctatcaactttaatcaagttgtaacttatattgaagacaatttgatacataataaaaaattatgacaatgaaaaaaaaaaaaaaaaaaaaaaagg

SEQ ID NO: 42 - DNA, 2015 bp, Homo sapiens
  misc_feature: dual specificity phosphatase 1
tcgctgcgaaggacatttgggctgtgtgtgcgacgcgggtcggaggggcagtcgggggaaccgcgaagaagccgaggagcccggagccccgcgtgacgctcctctctcagtccaaaagcggcttttggttcggcgcagagagacccgggggtctagcttttcctcgaaaagcgccgccctgcccttggccccgagaacagacaaagagcaccgcagggccgatcacgctgggggcgctgaggccggccatggtcatggaagtgggcaccctggacgctggaggcctgcgggcgctgctgggggagcgagcggcgcaatgcctgctgctggactgccgctccttcttcgctttcaacgccggccacatcgccggctctgtcaacgtgcgcttcagcaccatcgtgcggcgccgggccaagggcgccatgggcctggagcacatcgtgcccaacgccgagctccgcggccgcctgctggccggcgcctaccacgccgtggtgttgctggacgagcgcagcgccgccctggacggcgccaagcgcgacggcaccctggccctggcggccggcgcgctctgccgcgaggcgcgcgccgcgcaagtcttcttcctcaaaggaggatacgaagcgttttcggcttcctgcccggagctgtgcagcaaacagtcgacccccatggggctcagccttcccctgagtactagcgtccctgacagcgcggaatctgggtgcagttcctgcagtaccccactctacgatcagggtggcccggtggaaatcctgccctttctgtacctgggcagtgcgtatcacgcttcccgcaaggacatgctggatgccttgggcataactgccttgatcaacgtctcagccaattgtcccaaccattttgagggtcactaccagtacaagagcatccctgtggaggacaaccacaaggcagacatcagctcctggttcaacgaggccattgacttcatagactccatcaagaatgctggaggaagggtgtttgtccactgccaggcaggcatttcccggtcagccaccatctgccttgcttaccttatgaggactaatcgagtcaagctggacgaggcctttgagtttgtgaagcagaggcgaagcatcatctctcccaacttcagcttcatgggccagctgctgcagtttgagtcccaggtgctggctccgcactgttcggcagaggctgggagccccgccatggctgtgctcgaccgaggcacctccaccaccaccgtgttcaacttccccgtctccatccctgtccactccacgaacagtgcgctgagctaccttcagagccccattacgacctctcccagctgctgaaaggccacgggaggtgaggctcttcacatcccattgggactccatgctccttgagaggagaaatgcaataactctgggaggggctcgagagggctggtccttatttatttaacttcacccgagttcctctgggtttctaagcagttatggtgatgacttagcgtcaagacatttgctgaactcagcacattcgggaccaatatatagtgggtacatcaagtccatctgacaaaatggggcagaagagaaaggactcagtgtgtgatccggtttctttttgctcgcccctgttttttgtagaatctcttcatgcttgacatacctaccagtattattcccgacgacacatatacatatgagaatataccttatttatttttgtgtaggtgtctgccttcacaaatgtcattgtctactcctagaagaaccaaatacctcaatttttgtttttgagtactgtactatcctgtaaatatatcttaagcaggtttgttttcagcactgatggaaaataccagtgttgggtttttttttagttgccaacagttgtatgtttgctgattatttatgacctgaaataatatatttcttcttctaagaagacattttgttacataaggatgacttttttatacaatggaataaattatggcatttctattg

SEQ ID NO: 43 - DNA, 5722 bp, Homo sapiens
  misc_feature: thrombospondin 1
ggacgcacaggcattccccgcgcccctccagccctcgccgccctcgccaccgctcccggccgccgcgctccggtacacacaggatccctgctgggcaccaacagctccaccatggggctggcctggggactaggcgtcctgttcctgatgcatgtgtgtggcaccaaccgcattccagagtctggcggagacaacagcgtgtttgacatctttgaactcaccggggccgcccgcaaggggtctgggcgccgactggtgaagggccccgacccttccagcccagctttccgcatcgaggatgccaacctgatcccccctgtgcctgatgacaagttccaagacctggtggatgctgtgcgggcagaaaagggtttcctccttctggcatccctgaggcagatgaagaagacccggggcacgctgctggccctggagcggaaagaccactctggccaggtcttcagcgtggtgtccaatggcaaggcgggcaccctggacctcagcctgaccgtccaaggaaagcagcacgtggtgtctgtggaagaagctctcctggcaaccggccagtggaagagcatcaccctgtttgtgcaggaagacagggcccagctgtacatcgactgtgaaaagatggagaatgctgagttggacgtccccatccaaagcgtcttcaccagagacctggccagcatcgccagactccgcatcgcaaaggggggcgtcaatgacaatttccagggggtgctgcagaatgtgaggtttgtctttggaaccacaccagaagacatcctcaggaacaaaggctgctccagctctaccagtgtcctcctcacccttgacaacaacgtggtgaatggttccagccctgccatccgcactaactacattggccacaagacaaaggacttgcaagccatctgcggcatctcctgtgatgagctgtccagcatggtcctggaactcaggggcctgcgcaccattgtgaccacgctgcaggacagcatccgcaaagtgactgaagagaacaaagagttggccaatgagctgaggcggcctcccctatgctatcacaacggagttcagtacagaaataacgaggaatggactgttgatagctgcactgagtgtcactgtcagaactcagttaccatctgcaaaaaggtgtcctgccccatcatgccctgctccaatgccacagttcctgatggagaatgctgtcctcgctgttggcccagcgactctgcggacgatggctggtctccatggtccgagtggacctcctgttctacgagctgtggcaatggaattcagcagcgcggccgctcctgcgatagcctcaacaaccgatgtgagggctcctcggtccagacacggacctgccacattcaggagtgtgacaaaagatttaaacaggatggtggctggagccactggtccccgtggtcatcttgttctgtgacatgtggtgatggtgtgatcacaaggatccggctctgcaactctcccagcccccagatgaatgggaaaccctgtgaaggcgaagcgcgggagaccaaagcctgcaagaaagacgcctgccccatcaatggaggctggggtccttggtcaccatgggacatctgttctgtcacctgtggaggaggggtacagaaacgtagtcgtctctgcaacaaccccgcaccccagtttggaggcaaggactgcgttggtgatgtaacagaaaaccagatctgcaacaagcaggactgtccaattgatggatgcctgtccaatccctgctttgccggcgtgaagtgtactagctaccctgatggcagctggaaatgtggtgcttgtccccctggttacagtggaaatggcatccagtgcacagatgttgatgagtgcaaagaagtgcctgatgcctgcttcaaccacaatggagagcaccggtgtgagaacacggaccccggctacaactgcctgccctgccccccacgcttcaccggctcacagcccttcggccagggtgtcgaacatgccacggccaacaaacaggtgtgcaagccccgtaacccctgcacggatgggacccacgactgcaacaagaacgccaagtgcaactacctgggccactatagcgaccccatgtaccgctgcgagtgcaagcctggctacgctggcaatggcatcatctgcggggaggacacagacctggatggctggcccaatgagaacctggtgtgcgtggccaatgcgacttaccactgcaaaaaggataattgccccaaccttcccaactcagggcaggaagactatgacaaggatggaattggtgatgcctgtgatgatgacgatgacaatgataaaattccagatgacagggacaactgtccattccattacaacccagctcagtatgactatgacagagatgatgtgggagaccgctgtgacaactgtccctacaaccacaacccagatcaggcagacacagacaacaatggggaaggagacgcctgtgctgcagacattgatggagacggtatcctcaatgaacgggacaactgccagtacgtctacaatgtggaccagagagacactgatatggatggggttggagatcagtgtgacaattgccccttggaacacaatccggatcagctggactctgactcagaccgcattggagatacctgtgacaacaatcaggatattgatgaagatggccaccagaacaatctggacaactgtccctatgtgcccaatgccaaccaggctgaccatgacaaagatggcaagggagatgcctgtgaccacgatgatgacaacgatggcattcctgatgacaaggacaactgcagactcgtgcccaatcccgaccagaaggactctgacggcgatggtcgaggtgatgcctgcaaagatgattttgaccatgacagtgtgccagacatcgatgacatctgtcctgagaatgttgacatcagtgagaccgatttccgccgattccagatgattcctctggaccccaaagggacatcccaaaatgaccctaactgggttgtacgccatcagggtaaagaactcgtccagactgtcaactgtgatcctggactcgctgtaggttatgatgagtttaatgctgtggacttcagtggcaccttcttcatcaacaccgaaagggacgatgactatgctggatttgtctttggctaccagtccagcagccgcttttatgttgtgatgtggaagcaagtcacccagtcctactgggacaccaaccccacgagggctcagggatactcgggcctttctgtgaaagttgtaaactccaccacagggcctggcgagcacctgcggaacgccctgtggcacacaggaaacacccctggccaggtgcgcaccctgtggcatgaccctcgtcacataggctggaaagatttcaccgcctacagatggcgtctcagccacaggccaaagacgggtttcattagagtggtgatgtatgaagggaagaaaatcatggctgactcaggacccatctatgataaaacctatgctggtggtagactagggttgtttgtcttctctcaagaaatggtgttcttctctgacctgaaatacgaatgtagagatccctaatcatcaaattgttgattgaaagactgatcataaaccaatgctggtattgcaccttctggaactatgggcttgagaaaacccccaggatcacttctccttggcttccttcttttctgtgcttgcatcagtgtggactcctagaacgtgcgacctgcctcaagaaaatgcagttttcaaaaacagactcatcagcattcagcctccaatgaataagacatcttccaagcatataaacaattgctttggtttccttttgaaaaagcatctacttgcttcagttgggaaggtgcccattccactctgcctttgtcacagagcagggtgctattgtgaggccatctctgagcagtggactcaaaagcattttcaggcatgtcagagaagggaggactcactagaattagcaaacaaaaccaccctgacatcctccttcaggaacacggggagcagaggccaaagcactaaggggagggcgcatacccgagacgattgtatgaagaaaatatggaggaactgttacatgttcggtactaagtcattttcaggggattgaaagactattgctggatttcatgatgctgactggcgttagctgattaacccatgtaaataggcacttaaatagaagcaggaaagggagacaaagactggcttctggacttcctccctgatccccacccttactcatcaccttgcagtggccagaattagggaatcagaatcaaaccagtgtaaggcagtgctggctgccattgcctggtcacattgaaattggtggcttcattctagatgtagcttgtgcagatgtagcaggaaaataggaaaacctaccatctcagtgagcaccagctgcctcccaaaggaggggcagccgtgcttatatttttatggttacaatggcacaaaattattatcaacctaactaaaacattccttttctcttttttccgtaattactaggtagttttctaattctctcttttggaagtatgatttttttaaagtctttacgatgtaaaatatttattttttacttattctggaagatctggctgaaggattattcatggaacaggaagaagcgtaaagactatccatgtcatctttgttgagagtcttcgtgactgtaagattgtaaatacagattatttattaactctgttctgcctggaaatttaggcttcatacggaaagtgtttgagagcaagtagttgacatttatcagcaaatctcttgcaagaacagcacaaggaaaatcagtctaataagctgctctgccccttgtgctcagagtggatgttatgggattccttttttctctgttttatcttttcaagtggaattagttggttatccatttgcaaatgttttaaattgcaaagaaagccatgaggtcttcaatactgttttaccccatcccttgtgcatatttccagggagaaggaaagcatatacacttttttctttcatttttccaaaagagaaaaaaatgacaaaaggtgaaacttacatacaaatattacctcatttgttgtgtgactgagtaaagaatttttggatcaagcggaaagagtttaagtgtctaacaaacttaaagctactgtagtacctaaaaagtcagtgttgtacatagcataaaaactctgcagagaagtattcccaataaggaaatagcattgaaatgttaaatacaatttctgaaagttatgttttttttctatcatctggtataccattgctttatttttataaattattttctcattgccattggaatagaatattcagattgtgtagatatgctatttaaataatttatcaggaaatactgcctgtagagttagtatttctatttttatataatgtttgcacactgaattgaagaattgttggttttttcttttttttgttttttttttttttttttttttttttgcttttgacctcccatttttactatttgccaatacctttttctaggaatgtgcttttttttgtacacatttttatccattttacattctaaagcagtgtaagttgtatattactgtttcttatgtacaaggaacaacaataaatcatatggaaatttatattt

SEQ ID NO: 44 - DNA, 2669 bp, Homo sapiens
  misc_feature: glycoprotein (transmembrane) nmb
cagatgccagaagaacactgttgctcttggtggacgggcccagaggaattcagagttaaaccttgagtgcctgcgtccgtgagaattcagcatggaatgtctctactatttcctgggatttctgctcctggctgcaagattgccacttgatgccgccaaacgatttcatgatgtgctgggcaatgaaagaccttctgcttacatgagggagcacaatcaattaaatggctggtcttctgatgaaaatgactggaatgaaaaactctacccagtgtggaagcggggagacatgaggtggaaaaactcctggaagggaggccgtgtgcaggcggtcctgaccagtgactcaccagccctcgtgggctcaaatataacatttgcggtgaacctgatattccctagatgccaaaaggaagatgccaatggcaacatagtctatgagaagaactgcagaaatgaggctggtttatctgctgatccatatgtttacaactggacagcatggtcagaggacagtgacggggaaaatggcaccggccaaagccatcataacgtcttccctgatgggaaaccttttcctcaccaccccggatggagaagatggaatttcatctacgtcttccacacacttggtcagtatttccagaaattgggacgatgttcagtgagagtttctgtgaacacagccaatgtgacacttgggcctcaactcatggaagtgactgtctacagaagacatggacgggcatatgttcccatcgcacaagtgaaagatgtgtacgtggtaacagatcagattcctgtgtttgtgactatgttccagaagaacgatcgaaattcatccgacgaaaccttcctcaaagatctccccattatgtttgatgtcctgattcatgatcctagccacttcctcaattattctaccattaactacaagtggagcttcggggataatactggcctgtttgtttccaccaatcatactgtgaatcacacgtatgtgctcaatggaaccttcagccttaacctcactgtgaaagctgcagcaccaggaccttgtccgccaccgccaccaccacccagaccttcaaaacccaccccttctttaggacctgctggtgacaaccccctggagctgagtaggattcctgatgaaaactgccagattaacagatatggccactttcaagccaccatcacaattgtagagggaatcttagaggttaacatcatccagatgacagacgtcctgatgccggtgccatggcctgaaagctccctaatagactttgtcgtgacctgccaagggagcattcccacggaggtctgtaccatcatttctgaccccacctgcgagatcacccagaacacagtctgcagccctgtggatgtggatgagatgtgtctgctgactgtgagacgaaccttcaatgggtctgggacgtactgtgtgaacctcaccctgggggatgacacaagcctggctctcacgagcaccctgatttctgttcctgacagagacccagcctcgcctttaaggatggcaaacagtgccctgatctccgttggctgcttggccatatttgtcactgtgatctccctcttggtgtacaaaaaacacaaggaatacaacccaatagaaaatagtcctgggaatgtggtcagaagcaaaggcctgagtgtctttctcaaccgtgcaaaagccgtgttcttcccgggaaaccaggaaaaggatccgctactcaaaaaccaagaatttaaaggagtttcttaaatttcgaccttgtttctgaagctcacttttcagtgccattgatgtgagatgtgctggagtggctattaacctttttttcctaaagattattgttaaatagatattgtggtttggggaagttgaattttttataggttaaatgtcattttagagatggggagagggattatactgcaggcagcttcagccatgttgtgaaactgataaaagcaacttagcaaggcttcttttcattattttttatgtttcacttataaagtcttaggtaactagtaggatagaaacactgtgtcccgagagtaaggagagaagctactattgattagagcctaacccaggttaactgcaagaagaggcgggatactttcagctttccatgtaactgtatgcataaagccaatgtagtccagtttctaagatcatgttccaagctaactgaatcccacttcaatacacactcatgaactcctgatggaacaataacaggcccaagcctgtggtatgatgtgcacacttgctagactcagaaaaaatactactctcataaatgggtgggagtattttggtgacaacctactttgcttggctgagtgaaggaatgatattcatatattcatttattccatggacatttagttagtgctttttatataccaggcatgatgctgagtgacactcttgtgtatatttccaaatttttgtatagtcgctgcacatatttgaaatcatatattaagactttccaaagatgaggtccctggtttttcatggcaacttgatcagtaaggatttcacctctgtttgtaactaaaaccatctactatatgttagacatgacattctttttctctccttcctgaaaaataaagtgtgggaagagacaaaaaaaaaaaaa

SEQ ID NO: 45 - DNA, 1989 bp, Homo sapiens
  misc_feature: cellular repressor of E1A-stimulated genes 1
gcggccgccgggactcttcctggagacaccgccatggccgggctatcccgcgggtccgcgcgcgcactgctcgccgccctgctggcgtcgacgctgttggcgctgctcgtgtcgcccgcgcggggtcgcggcggccgggaccacggggactgggacgaggcctcccggctgccgccgctaccaccccgcgaggacgcggcgcgcgtggcccgcttcgtgacgcacgtctccgactggggcgctctggccaccatctccacgctggaggcggtgcgcggccggcccttcgccgacgtcctctcgctcagcgacgggcccccgggcgcgggcagcggcgtgccctatttctacctgagcccgctgcagctctccgtgagcaacctgcaggagaatccatatgctacactgaccatgactttggcacagaccaacttctgcaagaaacatggatttgatccacaaagtcccctttgtgttcacataatgctgtcaggaactgtgaccaaggtgaatgaaacagaaatggatattgcaaagcattcgttattcattcgacaccctgagatgaaaacctggccttccagccataattggttctttgctaagttgaatataaccaatatctgggtcctggactactttggtggaccaaaaatcgtgacaccagaagaatattataatgtcacagttcagtgaagcagactgtggtgaatttagcaacacttatgaagtttcttaaagtggctcatacacacttaaaaggcttaatgtttctctggaaagcgtcccagaatattagccagttttctgtcacatgctggtttgtttgcttgcttgtttacttgcttgtttaccaatagagttgacctgttattggatttcctggaagatgtggtagctacttttttcctattttgaagccattttcgtagagaaatatccttcactataatcaaataagttttgtcccatcaattccaaagatgtttccagtggtgctcttgaagaggaatgagtaccagttttaaattgcccattggcatttgaaggtagttgagtatgtgttctttattcctagaagccactgtgcttggtagagtgcatcactcaccacagctgcctcctgagctgcctgagcctggtgcaaaaggattggcccccattatggtgcttctgaataaatcttgccaagatagacaaacaatgatgaaactcagatggagcttcctactcatgttgatttatgtctcacaatcctgggtattgttaattcaacatagggtgaaactatttctgataaagaacttttgaaaaactttttatactctaaagtgatactcagaacaaaagaaagtcataaaactcctgaatttaatttccccacctaagtcgagacagtattatcaaaacacatgtgcacacagattattttttggctccaaaactggattgcaaaagaaagaggagaagaatattttgtgtgttcctggtattcttttataagtaaagtttacccaggcatggaccagcttcagccagggacaaaatcccctcccaaaccactctccacagctttttaaaaatacttctactcttaacaattacctaaggcttcctcaactgccccaaatctcttaatagcttctagtgctgctacaatctaagtcaggtcaccagagggaagagaacatggcattaaaagaatcacatcttcagaagagaagacactaatattattacccatatacatgatttcagaagatgacataagattcctcttaaagaggaaatgtcaggaatcaagccactgaatccttaaagagaaaagttgaatatgagtcattgtgtctgaaaactgcaaagtgaacttaactgagatccagcaaacaggttctgtttaagaaaaataatttatactaaatttagtaaaatggacttcttattcaaagcatcaataattaaaagaattattttaaaaaaaaaaaaaaa

SEQ ID NO: 46 - DNA, 1231 bp, Homo sapiens
  misc_feature: proliferating cell nuclear antigen
aggtctcagccggtcgtcgcgacgttcgcccgctcgctctgaggctcctgaagccgaaactagctagactttcctccttcccgcctgcctgtagcggcgttgttgccactccgccaccatgttcgaggcgcgcctggtccagggctccatcctcaagaaggtgttggaggcactcaaggacctcatcaacgaggcctgctgggatattagctccagcggtgtaaacctgcagagcatggactcgtcccacgtctctttggtgcagctcaccctgcggtctgagggcttcgacacctaccgctgcgaccgcaacctggccatgggcgtgaacctcaccagtatgtccaaaatactaaaatgcgccggcaatgaagatatcattacactaagggccgaagataacgcggataccttggcgctagtatttgaagcaccaaaccaggagaaagtttcagactatgaaatgaagttgatggatttagatgttgaacaacttggaattccagaacaggagtacagctgtgtagtaaagatgccttctggtgaatttgcacgtatatgccgagatctcagccatattggagatgctgttgtaatttcctgtgcaaaagacggagtgaaattttctgcaagtggagaacttggaaatggaaacattaaattgtcacagacaagtaatgtcgataaagaggaggaagctgttaccatagagatgaatgaaccagttcaactaacttttgcactgaggtacctgaacttctttacaaaagccactccactctcttcaacggtgacactcagtatgtctgcagatgtaccccttgttgtagagtataaaattgcggatatgggacacttaaaatactacttggctcccaagatcgaggatgaagaaggatcttaggcattcttaaaattcaagaaaataaaactaagctctttgagaactgcttctaagatgccagcatatactgaagtcttttctgtcaccaaatttgtacctctaagtacatatgtagatattgttttctgtaaataacctattttttttctctattctctccaatttgtttaaagaataaagtccaaagtctgatctggtctagttaacctagaagtatttttgtctcttagaaatacttgtgatttttataatacaaaagggtcttgactctaaatgcagttttaagaagtgtttttgaatttaaataaagttacttgaatttcaaac

SEQ ID NO: 47 - DNA, 5843 bp, Homo sapiens
  misc_feature: topoisomerase (DNA) II alpha
  misc_feature (72)..(75): n is a, c, g, or t
  misc_feature (78)..(89): n is a, c, g, or t
  misc_feature (4902)..(4902): n is a, c, g, or t
  misc_feature (4919)..(4919): n is a, c, g, or t
  misc_feature (4930)..(4930): n is a, c, g, or t
  misc_feature (4946)..(4946): n is a, c, g, or t
  misc_feature (5723)..(5733): n is a, c, g, or t
  misc_feature (5735)..(5737): n is a, c, g, or t
  misc_feature (5740)..(5742): n is a, c, g, or t
ctaaccgacgcgcgtctgtggagaagcggcttggtcgggggtggtctcgtggggtcctgcctgtttagtcgnnnncannnnnnnnnnnncccttcacgaccgtcaccatggaagtgtcaccattgcagcctgtaaatgaaaatatgcaagtcaacaaaataaagaaaaatgaagatgctaagaaaagactgtctgttgaaagaatctatcaaaagaaaacacaattggaacatattttgctccgcccagacacctacattggttctgtggaattagtgacccagcaaatgtgggtttacgatgaagatgttggcattaactatagggaagtcacttttgttcctggtttgtacaaaatctttgatgagattctagttaatgctgcggacaacaaacaaagggacccaaaaatgtcttgtattagagtcacaattgatccggaaaacaatttaattagtatatggaataatggaaaaggtattcctgttgttgaacacaaagttgaaaagatgtatgtcccagctctcatatttggacagctcctaacttctagtaactatgatgatgatgaaaagaaagtgacaggtggtcgaaatggctatggagccaaattgtgtaacatattcagtaccaaatttactgtggaaacagccagtagagaatacaagaaaatgttcaaacagacatggatggataatatgggaagagctggtgagatggaactcaagcccttcaatggagaagattatacatgtatcacctttcagcctgatttgtctaagtttaaaatgcaaagcctggacaaagatattgttgcactaatggtcagaagagcatatgatattgctggatccaccaaagatgtcaaagtctttcttaatggaaataaactgccagtaaaaggatttcgtagttatgtggacatgtatttgaaggacaagttggatgaaactggtaactccttgaaagtaatacatgaacaagtaaaccacaggtgggaagtgtgtttaactatgagtgaaaaaggctttcagcaaattagctttgtcaacagcattgctacatccaagggtggcagacatgttgattatgtagctgatcagattgtgactaaacttgttgatgttgtgaagaagaagaacaagggtggtgttgcagtaaaagcacatcaggtgaaaaatcacatgtggatttttgtaaatgccttaattgaaaacccaacctttgactctcagacaaaagaaaacatgactttacaacccaagagctttggatcaacatgccaattgagtgaaaaatttatcaaagctgccattggctgtggtattgtagaaagcatactaaactgggtgaagtttaaggcccaagtccagttaaacaagaagtgttcagctgtaaaacataatagaatcaagggaattcccaaactcgatgatgccaatgatgcagggggccgaaactccactgagtgtacgcttatcctgactgagggagattcagccaaaactttggctgtttcaggccttggtgtggttgggagagacaaatatggggttttccctcttagaggaaaaatactcaatgttcgagaagcttctcataagcagatcatggaaaatgctgagattaacaatatcatcaagattgtgggtcttcagtacaagaaaaactatgaagatgaagattcattgaagacgcttcgttatgggaagataatgattatgacagatcaggaccaagatggttcccacatcaaaggcttgctgattaattttatccatcacaactggccctctcttctgcgacatcgttttctggaggaatttatcactcccattgtaaaggtatctaaaaacaagcaagaaatggcattttacagccttcctgaatttgaagagtggaagagttctactccaaatcataaaaaatggaaagtcaaatattacaaaggtttgggcaccagcacatcaaaggaagctaaagaatactttgcagatatgaaaagacatcgtatccagttcaaatattctggtcctgaagatgatgctgctatcagcctggcctttagcaaaaaacagatagatgatcgaaaggaatggttaactaatttcatggaggatagaagacaacgaaagttacttgggcttcctgaggattacttgtatggacaaactaccacatatctgacatataatgacttcatcaacaaggaacttatcttgttctcaaattctgataacgagagatctatcccttctatggtggatggtttgaaaccaggtcagagaaaggttttgtttacttgcttcaaacggaatgacaagcgagaagtaaaggttgcccaattagctggatcagtggctgaaatgtcttcttatcatcatggtgagatgtcactaatgatgaccattatcaatttggctcagaattttgtgggtagcaataatctaaacctcttgcagcccattggtcagtttggtaccaggctacatggtggcaaggattctgctagtccacgatacatctttacaatgctcagctctttggctcgattgttatttccaccaaaagatgatcacacgttgaagtttttatatgatgacaaccagcgtgttgagcctgaatggtacattcctattattcccatggtgctgataaatggtgctgaaggaatcggtactgggtggtcctgcaaaatccccaactttgatgtgcgtgaaattgtaaataacatcaggcgtttgatggatggagaagaacctttgccaatgcttccaagttacaagaacttcaagggtactattgaagaactggctccaaatcaatatgtgattagtggtgaagtagctattcttaattctacaaccattgaaatctcagagcttcccgtcagaacatggacccagacatacaaagaacaagttctagaacccatgttgaatggcaccgagaagacacctcctctcataacagactatagggaataccatacagataccactgtgaaatttgttgtgaagatgactgaagaaaaactggcagaggcagagagagttggactacacaaagtcttcaaactccaaactagtctcacatgcaactctatggtgctttttgaccacgtaggctgtttaaagaaatatgacacggtgttggatattctaagagacttttttgaactcagacttaaatattatggattaagaaaagaatggctcctaggaatgcttggtgctgaatctgctaaactgaataatcaggctcgctttatcttagagaaaatagatggcaaaataatcattgaaaataagcctaagaaagaattaattaaagttctgattcagaggggatatgattcggatcctgtgaaggcctggaaagaagcccagcaaaaggttccagatgaagaagaaaatgaagagagtgacaacgaaaaggaaactgaaaagagtgactccgtaacagattctggaccaaccttcaactatcttcttgatatgcccctttggtatttaaccaaggaaaagaaagatgaactctgcaggctaagaaatgaaaaagaacaagagctggacacattaaaaagaaagagtccatcagatttgtggaaagaagacttggctacatttattgaagaattggaggctgttgaagccaaggaaaaacaagatgaacaagtcggacttcctgggaaaggggggaaggccaaggggaaaaaaacacaaatggctgaagttttgccttctccgcgtggtcaaagagtcattccacgaataaccatagaaatgaaagcagaggcagaaaagaaaaataaaaagaaaattaagaatgaaaatactgaaggaagccctcaagaagatggtgtggaactagaaggcctaaaacaaagattagaaaagaaacagaaaagagaaccaggtacaaagacaaagaaacaaactacattggcatttaagccaatcaaaaaaggaaagaagagaaatccctggtctgattcagaatcagataggagcagtgacgaaagtaattttgatgtccctccacgagaaacagagccacggagagcagcaacaaaaacaaaattcacaatggatttggattcagatgaagatttctcagattttgatgaaaaaactgatgatgaagattttgtcccatcagatgctagtccacctaagaccaaaacttccccaaaacttagtaacaaagaactgaaaccacagaaaagtgtcgtgtcagaccttgaagctgatgatgttaagggcagtgtaccactgtcttcaagccctcctgctacacatttcccagatgaaactgaaattacaaacccagttcctaaaaagaatgtgacagtgaagaagacagcagcaaaaagtcagtcttccacctccactaccggtgccaaaaaaagggctgccccaaaaggaactaaaagggatccagctttgaattctggtgtctctcaaaagcctgatcctgccaaaaccaagaatcgccgcaaaaggaagccatccacttctgatgattctgactctaattttgagaaaattgtttcgaaagcagtcacaagcaagaaatccaagggggagagtgatgacttccatatggactttgactcagctgtggctcctcgggcaaaatctgtacgggcaaagaaacctataaagtacctggaagagtcagatgaagatgatctgttttaaaatgtgaggcgattattttaagtaattatcttaccaagcccaagactggttttaaagttacctgaagctcttaacttcctcccctctgaatttagtttggggaaggtgtttttagtacaagacatcaaagtgaagtaaagcccaagtgttctttagctttttataatactgtctaaatagtgaccatctcatgggcatngttttcttctctgcttngtctgtgtttngagtctgctttctttngtctttaaaacctgatttttaagttcttctgaactgtagaaatagctatctgatcacttcagcgtaaagcagtgtgtttattaaccatccactaagctaaaactagagcagtttgatttaaaagtgtcactcttcctccttttctactttcagtagatatgagatagagcataattatctgttttatcttagttttatacataatttaccatcagatagaactttatggttctagtacagatactctactacactcagcctcttatgtgccaagtttttctttaagcaatgagaaattgctcatgttcttcatcttctcaaatcatcagaggccgaagaaaaacactttggctgtgtctataacttgacacagtcaatagaatgaagaaaattagagtagttatgtgattatttcagctcttgacctgtcccctctggctgcctctgagtctgaatctcccaaagagagaaaccaatttctaagaggactggattgcagaagactcggggacaacatttgatccaagatcttaaatgttatattgataaccatgctcagcaatgagctattagattcattttgggaaatctccataatttcaatttgtaaactttgttaagacctgtctacattgttatatgtgtgtgacttgagtaatgttatcaacgtttttgtaaatatttactatgtttttctattagctaaattccaacaattttgtactttaataaaatgttctaaacattgcaaaaaaaaaaaaaaaaaaaaaaaaaaannnnnnnnnnnannnaannncgcctatagtgaatcctattaccattacctggccgcgttttacacctcttgattggaaaaccctgggttaccaacttaatgccttggaaaaatccactttg

SEQ ID NO: 48 - DNA, 772 bp, Homo sapiens
  misc_feature: cystatin C
cgcagcgggtcctctctatctagctccagcctctcgcctgcgccccactccccgcgtcccgcgtcctagccgaccatggccgggcccctgcgcgccccgctgctcctgctggccatcctggccgtggccctggccgtgagccccgcggccggctccagtcccggcaagccgccgcgcctggtgggaggccccatggacgccagcgtggaggaggagggtgtgcggcgtgcactggactttgccgtcggcgagtacaacaaagccagcaacgacatgtaccacagccgcgcgctgcaggtggtgcgcgcccgcaagcagatcgtagctggggtgaactacttcttggacgtggagctgggccgaaccacgtgtaccaagacccagcccaacttggacaactgccccttccatgaccagccacatctgaaaaggaaagcattctgctctttccagatctacgctgtgccttggcagggcacaatgaccttgtcgaaatccacctgtcaggacgcctaggggtctgtaccgggctggcctgtgcctatcacctcttatgcacacctcccaccccctgtattcccacccctggactggtggcccctgccttggggaaggtctccccatgtgcctgcaccaggagacagacagagaaggcagcaggcggcctttgttgctcagcaaggggctctgccctccctccttccttcttgcttctcatagccccggtgtgcggtgcatacacccccacctcctgcaataaaatagtagcatc

SEQ ID NO: 49 - DNA, 1032 bp, Homo sapiens
  misc_feature: interferon, gamma-inducible protein 30
ggagggtgggcagcactcgctttattgtccagcattccacatggatagtcgccacacctttgcccctgctgcgatgaccctgtcgccacttctgctgttcctgccaccgctgctgctgctgctggacgtccccacggcggcggtgcaggcgtcccctctgcaagcgttagacttctttgggaatgggccaccagttaactacaagacaggcaatctatacctgcgggggcccctgaagaagtccaatgcaccgcttgtcaatgtgaccctctactatgaagcactgtgcggtggctgccgagccttcctgatccgggagctcttcccaacatggctgttggtcatggagatcctcaatgtcacgtcggtgccctacggaaacgcacaggaacaaaatgtcagtggcaggtgggagttcaagtgccagcttggagaagaggagtgcaaattcaacaaggtggaggcctgcgtgttggatgaacttgacatggagctagccttcctgaccatgtctggcatggcatggaagagtttgaggacatggagagaagtctgccactatgcctgcagctctacgccccagggctgtcgccagaactatcatggagtgtgcaatgggggaccgcggcatgcagctcatgcacgccaacgcccagcggacagatgctctccagccaccgcacgagtatgtgccctgggtcaccgtcaatgggaaacccttggaagatcagacccagctccttacccttgtctgccagttgtaccagggcaagaagccggatgtctgcccttcctcaaccagctccctccggagtgtttgcttcgagtgttggccggtgggctgcggagagctcatggaaggcgagtgggaactcggctgcctgcctttttttctgatccagaccctcggcacctgctacttaccaactggaaaattttatgcatcccatgaagcccagatacacaaaattccacccctagatcaagaatcctgctccactaagaatggtgctaaagtaaaactagtttaat

SEQ ID NO: 50 - DNA, 1989 bp, Homo sapiens
  misc_feature: aldehyde dehydrogenase 2 family (mitochondrial)
gctctcggtccgctcgctgtccgctagcccgctgcgatgttgcgcgctgccgccgctcgggccccgcctggccgccgcctcttgtcagccgccgccacccaggccgtgcctgcccccaaccagcagcccgaggtcttctgcaaccagattttcataaacaatgaatggcacgatgccgtcagcaggaaaacattccccaccgtcaatccgtccactggagaggtcatctgtcaggtagctgaaggggacaaggaagatgtggacaaggcacgtgaaggccgcccgggcgccttccagctgggctcaccttggcgccgcatggacgcatcacacagcggccggctgctgaaccgcctggccgatctgatcgagcgggaccggacctacctggcggccttggagaccctggacaatggcaagccctatgtcatctcctacctggtggatttggacatggtcctcaaatgtctccggtattatgccggctgggctgataagtaccacgggaaaaccatccccattgacggagacttcttcagctacacacgccatgaacctgtgggggtgtgcgggcagatcattccgtggaatttcccgctcctgatgcaagcatggaagctgggcccagccttggcaactggaaacgtggttgtgatgaaggtagctgagcagacacccctcaccgccctctatgtggccaacctgatcaaggaggctggctttccccctggtgtggtcaacattgtgcctggatttggccccacggctggggccgccattgcctcccatgaggatgtggacaaagtggcattcacaggctccactgagattggccgcgtaatccaggttgctgctgggagcagcaacctcaagagagtgaccttggagctgggggggaagagccccaacatcatcatgtcagatgccgatatggattgggccgtggaacaggcccacttcgccctgttcttcaaccagggccagtgctgctgtgccggctcccggaccttcgtgcaggaggacatctatgatgagtttgtggtgcggagcgttgcccgggccaagtctcgggtggtcgggaacccctttgatagcaagaccgagcaggggccgcaggtggatgaaactcagtttaagaagatcctcggctacatcaacacggggaagcaagagggggcgaagctgctgtgtggtgggggcattgctgctgaccgtggttacttcatccagcccactgtgtttggagatgtgcaggatggcatgaccatcgccaaggaggagatcttcgggccagtgatgcagatcctgaagttcaagaccatagaggaggttgttgggagagccaacaattccacgtacgggctggccgcagctgtcttcacaaaggatttggacaaggccaattacctgtcccaggccctccaggcgggcactgtgtgggtcaactgctatgatgtgtttggagcccagtcaccctttggtggctacaagatgtcggggagtggccgggagttgggcgagtacgggctgcaggcatacactgaagtgaaaactgtcacagtcaaagtgcctcagaagaactcataagaatcatgcaagcttcctccctcagccattgatggaaagttcagcaagatcagcaacaaaaccaagaaaaatgatccttgcgtgctgaatatctgaaaagagaaatttttcctacaaaatctcttgggtcaagaaagttctagaatttgaattgataaacatggtgggttggctgagggtaagagtatatgaggaaccttttaaacgacaacaatactgctagctttcaggatgatttttaaaaaatagattcaaatgtgttatcctctctctgaaacgcttcctataactcgagtttataggggaagaaaaagctattgtttacaattatatcaccattaaggcaactgctacaccctgctttgtattctgggctaagattcattaaaaactagctgctct

SEQ ID NO: 51 - DNA, 10558 bp, Homo sapiens
  misc_feature: collagen, type VI, alpha 3
cagtttggagctcagtcttccaccaaaggccgttcagttctcctgggctccagcctcctgcaaggactgcaagagttttcctccgcagctctgagtctccacttttttggtggagaaaggctgcaaaaagaaaaagagacgcagtgagtgggaaaagtatgcatcctattcaaacctaattgaatcgaggagcccagggacacacgccttcaggtttgctcaggggttcatatttggtgcttagacaaattcaaaatgaggaaacatcggcacttgcccttagtggccgtcttttgcctctttctctcaggctttcctacaactcatgcccagcagcagcaagcagatgtcaaaaatggtgcggctgctgatataatatttctagtggattcctcttggaccattggagaggaacatttccaacttgttcgagagtttctatatgatgttgtaaaatccttagctgtgggagaaaatgatttccattttgctctggtccagttcaacggaaacccacataccgagttcctgttaaatacgtatcgtactaaacaagaagtcctttctcatatttccaacatgtcttatattgggggaaccaatcagactggaaaaggattagaatacataatgcaaagccacctcaccaaggctgctggaagccgggccggtgacggagtccctcaggttatcgtagtgttaactgatggacactcgaaggatggccttgctctgccctcagcggaacttaagtctgctgatgttaacgtgtttgcaattggagttgaggatgcagatgaaggagcgttaaaagaaatagcaagtgaaccgctcaatatgcatatgttcaacctagagaattttacctcacttcatgacatagtaggaaacttagtgtcctgtgtgcattcatccgtgagtccagaaagggctggggacacggaaacccttaaagacatcacagcacaagactctgctgacattattttccttattgatggatcaaacaacaccggaagtgtcaatttcgcagtcattctcgacttccttgtaaatctccttgagaaactcccaattggaactcagcagatccgagtgggggtggtccagtttagcgatgagcccagaaccatgttttccttggacacctactccaccaaggcccaggttctgggtgcagtgaaagccctcgggtttgctggtggggagttggccaatatcggcctcgcccttgatttcgtggtggagaaccacttcacccgggcagggggcagccgcgtggaggaaggggttccccaggtgctggtcctcataagtgccgggccttctagtgacgagattcgctacggggtggtagcactgaagcaggctagcgtgttctcattcggccttggagcccaggccgcctccagggcagagcttcagcacatagctaccgatgacaacttggtgtttactgtcccggaattccgtagctttggggacctccaggagaaattactgccgtacattgttggcgtggcccaaaggcacattgtcttgaaaccgccaaccattgtcacacaagtcattgaagtcaacaagagagacatagtcttcctggtggatggctcatctgcactgggactggccaacttcaatgccatccgagacttcattgctaaagtcatccagaggctggaaatcggacaggatcttatccaggtggcagtggcccagtatgcagacactgtgaggcctgaattttatttcaatacccatccaacaaaaagggaagtcataaccgctgtgcggaaaatgaagcccctggacggctcggccctgtacacgggctctgctctagactttgttcgtaacaacctattcacgagttcagccggctaccgggctgccgaggggattcctaagcttttggtgctgatcacaggtggtaagtccctagatgaaatcagccagcctgcccaggagctgaagagaagcagcataatggcctttgccattgggaacaagggtgccgatcaggctgagctggaagagatcgctttcgactcctccctggtgttcatcccagctgagttccgagccgccccattgcaaggcatgctgcctggcttgctggcacctctcaggaccctctctggaacccctgaagttcactcaaacaaaagagatatcatctttcttttggatggatcagccaacgttggaaaaaccaatttcccttatgtgcgcgactttgtaatgaacctagttaacagccttgatattggaaatgacaatattcgtgttggtttagtgcaatttagtgacactcctgtaacggagttctctttaaacacataccagaccaagtcagatatccttggtcatctgaggcagctgcagctccagggaggttcgggcctgaacacaggctcagccctaagctatgtctatgccaaccacttcacggaagctggcggcagcaggatccgtgaacacgtgccgcagctcctgcttctgctcacagctgggcagtctgaggactcctatttgcaagctgccaacgccttgacacgcgcgggcatcctgactttttgtgtgggagctagccaggcgaataaggcagagcttgagcagattgcttttaacccaagcctggtgtatctcatggatgatttcagctccctgccagctttgcctcagcagctgattcagcccctaaccacatatgttagtggaggtgtggaggaagtaccactcgctcagccagagagcaagcgagacattctgttcctctttgacggctcagccaatcttgtgggccagttccctgttgtccgtgactttctctacaagattatcgatgagctcaatgtgaagccagaggggacccgaattgcggtggctcagtacagcgatgatgtcaaggtggagtcccgttttgatgagcaccagagtaagcctgagatcctgaatcttgtgaagagaatgaagatcaagacgggcaaagccctcaacctgggctacgcgctggactatgcacagaggtacatttttgtgaagtctgctggcagccggatcgaggatggagtgcttcagttcctggtgctgctggtcgcaggaaggtcatctgaccgtgtggatgggccagcaagtaacctgaagcagagtggggttgtgcctttcatcttccaagccaagaacgcagaccctgctgagttagagcagatcgtgctgtctccagcgtttatcctggctgcagagtcgcttcccaagattggagatcttcatccacagatagtgaatctcttaaaatcagtgcacaacggagcaccagcaccagtttcaggtgaaaaggacgtggtgtttctgcttgatggctctgagggcgtcaggagcggcttccctctgttgaaagagtttgtccagagagtggtggaaagcctggatgtgggccaggaccgggtccgcgtggccgtggtgcagtacagcgaccggaccaggcccgagttctacctgaattcatacatgaacaagcaggacgtcgtcaacgctgtccgccagctgaccctgctgggagggccgacccccaacaccggggccgccctggagtttgtcctgaggaacatcctggtcagctctgcgggaagcaggataacagaaggtgtgccccagctgctgatcgtcctcacggccgacaggtctggggatgatgtgcggaacccctccgtggtcgtgaagaggggtggggctgtgcccattggcattggcatcgggaacgctgacatcacagagatgcagaccatctccttcatcccggactttgccgtggccattcccacctttcgccagctggggaccgtccaacaggtcatctctgagagggtgacccagctcacccgcgaggagctgagcaggctgcagccggtgttgcagcctctaccgagcccaggtgttggtggcaagagggacgtggtctttctcatcgatgggtcccaaagtgccgggcctgagttccagtacgttcgcaccctcatagagaggctggttgactacctggacgtgggctttgacaccacccgggtggctgtcatccagttcagcgatgaccccaaggcggagttcctgctgaacgcccattccagcaaggatgaagtgcagaacgcggtgcagcggctgaggcccaagggagggcggcagatcaacgtgggcaatgccctggagtacgtgtccaggaacatcttcaagaggcccctggggagccgcattgaagagggcgtcccacagttcctggtcctcatctcgtctggaaagtctgacgatgaggtggtcgtcccggcggtggagctcaagcagtttggcgtggcccctttcacgatcgccaggaacgcagaccaggaggagctggtgaagatctcgctgagccccgaatatgtgttctcggtgagcaccttccgggagctgcccagcctggagcagaaactgctgacgcccatcacgaccctgacctcagagcagatccagaagctcttagccagcactcgctatccacctccagcagttgagagtgatgctgcagacattgtctttctgatcgacagctctgagggagttaggccagatggctttgcacatattcgagattttgttagcaggattgttcgaagactcaacatcggccccagtaaagtgagagttggggtcgtgcagttcagcaatgatgtcttcccagaattctatctgaaaacctacagatcccaggccccggtgctggacgccatacggcgcctgaggctcagaggggggtccccactgaacactggcaaggctctcgaatttgtggcaagaaacctctttgttaagtctgcggggagtcgcatagaagacggggtgccccaacacctggtcctggtcctgggtggaaaatcccaggacgatgtgtccaggttcgcccaggtgatccgttcctcgggcattgtgagtttaggggtaggagaccggaacatcgacagaacagagctgcagaccatcaccaatgaccccagactggtcttcacagtgcgagagttcagagagcttcccaacatagaagaaagaatcatgaactcgtttggaccctccgcagccactcctgcacctccaggggtggacacccctcctccttcacggccagagaagaagaaagcagacattgtgttcctgttggatggttccatcaacttcaggagggacagtttccaggaagtgcttcgttttgtgtctgaaatagtggacacagtttatgaagatggcgactccatccaagtggggcttgtccagtacaactctgaccccactgacgaattcttcctgaaggacttctctaccaagaggcagattattgacgccatcaacaaagtggtctacaaagggggaagacacgccaacactaaggtgggccttgagcacctgcgggtaaaccactttgtgcctgaggcaggcagccgcctggaccagcgggtccctcagattgcctttgtgatcacgggaggaaagtcggtggaagatgcacaggatgtgagcctggccctcacccagaggggggtcaaagtgtttgctgttggagtgaggaatatcgactcggaggaggttggaaagatagcgtccaacagcgccacagcgttccgcgtgggcaacgtccaggagctgtccgaactgagcgagcaagttttggaaactttgcatgatgcgatgcatgaaaccctttgccctggtgtaactgatgctgccaaagcttgtaatctggatgtgattctggggtttgatggttctagagaccagaatgtttttgtggcccagaagggcttcgagtccaaggtggacgccatcttgaacagaatcagccagatgcacagggtcagctgcagcggtggccgctcgcccaccgtgcgtgtgtcagtggtggccaacacgccctcgggcccggtggaggcctttgactttgacgagtaccagccagagatgctcgagaagttccggaacatgcgcagccagcacccctacgtcctcacggaggacaccctgaaggtctacctgaacaagttcagacagtcctcgccggacagcgtgaaggtggtcattcattttactgatggagcagacggagatctggctgatttacacagagcatctgagaacctccgccaagaaggagtccgtgccttgatcctggtgggccttgaacgagtggtcaacttggagcggctaatgcatctggagtttgggcgagggtttatgtatgacaggcccctgaggcttaacttgctggacttggattatgaactagcggagcagcttgacaacattgccgagaaagcttgctgtggggttccctgcaagtgctctgggcagaggggagaccgcgggcccatcggcagcatcgggccaaagggtattcctggagaagacggctaccgaggctatcctggtgatgagggtggacccggtgagcgtggtccgcctggtgtgaacggcactcaaggtttccagggctgcccgggccagagaggagtaaagggctctcggggattcccaggagagaagggcgaagtaggagaaattggactggatggtctggatggtgaagatggagacaaaggattgcctggttcttctggagagaaagggaatcctggaagaaggggtgataaaggacctcgaggagagaaaggagaaagaggagatgttgggattcgaggggacccgggtaacccaggacaagacagccaggagagaggacccaaaggagaaaccggtgacctcggccccatgggtgtcccagggagagatggagtacctggaggacctggagaaactgggaagaatggtggctttggccgaaggggaccccccggagctaagggcaacaagggcggtcctggccagccgggctttgagggagagcaggggaccagaggtgcacagggcccagctggtcctgctggtcctccagggctgataggagaacaaggcatttctggacctaggggaagcggaggtgcccgtggcgctcctggagaacgaggcagaaccggtccactgggaagaaagggtgagcccggagagccaggaccaaaaggaggaatcgggaacccgggccctcgtggggagacgggagatgacgggagagacggagttggcagtgaaggacgcagaggcaaaaaaggagaaagaggatttcctggatacccaggaccaaagggtaacccaggtgaacctgggctaaatggaacaacaggacccaaaggcatcagaggccgaaggggaaattcgggacctccagggatagttggacagaaggggagacctggctacccaggaccagctggtccaaggggcaacaggggcgactccatcgatcaatgtgccctcatccaaagcatcaaagataaatgcccttgctgttacgggcccctggagtgccccgtcttcccaacagaactagcctttgctttagacacctctgagggagtcaaccaagacactttcggccggatgcgagatgtggtcttgagtattgtgaatgtcctgaccattgctgagagcaactgcccgacgggggcccgggtggctgtggtcacctacaacaacgaggtgaccacggagatccggtttgctgactccaagaggaagtcggtcctcctggacaagattaagaaccttcaggtggctctgacatccaaacagcagagtctggagactgccatgtcgtttgtggccaggaacacatttaagcgtgtgaggaacggattcctaatgaggaaagtggctgttttcttcagcaacacacccacaagagcatccccacagctcagagaggctgtgctcaaactctcagatgcggggatcacccccttgttccttacaaggcaggaagaccggcagctcatcaacgctttgcagatcaataacacagcagtggggcatgcgcttgtcctgcctgcagggagagacctcacagacttcctggagaatgtcctcacgtgtcatgtttgcttggacatctgcaacatcgacccatcctgtggatttggcagttggaggccttccttcagggacaggagagcggcagggagtgatgtggacatcgacatggctttcatcttagacagcgctgagaccaccaccctgttccagttcaatgagatgaagaagtacatagcgtacctggtcagacaactggacatgagcccagatcccaaggcctcccagcacttcgccagagtggcagttgtgcagcacgcgccctctgagtccgtggacaatgccagcatgccacctgtgaaggtggaattctccctgactgactatggctccaaggagaagctggtggacttcctcagcaggggaatgacacagttgcagggaaccagggccttaggcagtgccattgaatacaccatagagaatgtctttgaaagtgccccaaacccacgggacctgaaaattgtggtcctgatgctgacgggcgaggtgccggagcagcagctggaggaggcccagagagtcatcctgcaggccaaatgcaagggctacttcttcgtggtcctgggcattggcaggaaggtgaacatcaaggaggtatacaccttcgccagtgagccaaacgacgtcttcttcaaattagtggacaagtccaccgagctcaacgaggagcctttgatgcgcttcgggaggctgttgccgtccttcgtcagcagtgaaaatgctttttacttgtccccagatatcaggaaacagtgtgattggttccaaggggaccaacccacaaagaaccttgtgaagtttggtcacaaacaagtaaatgttccgaataacgttacttcaagtcctacatccaacccagtgacgacaacgaagccggtgactacgacgaagccggtgaccaccacaacaaagcctgtaaccaccacaacaaagcctgtgactattataaatcagccatctgtgaagccagccgctgcaaagccggcccctgcgaaacctgtggctgccaagcctgtggccacaaagacggccactgttagacccccagtggcggtgaagccagcaacagcagcgaagcctgtagcagcaaagccagcagctgtaagaccccccgctgctgctgcaaaaccagtggcgaccaagcctgaggtccctaggccacaggcagccaaaccagctgccaccaagccagccaccactaagcccgtggttaagatgctccgtgaagtccaggtgtttgagataacagagaacagcgccaaactccactgggagaggcctgagccccccggtccttatttttatgacctcaccgtcacctcagcccatgatcagtccctggttctgaagcagaacctcacggtcacggaccgcgtcattggaggcctgctcgctgggcagacataccatgtggctgtggtctgctacctgaggtctcaggtcagagccacctaccacggaagtttcagtacaaagaaatctcagcccccacctccacagccagcaaggtcagcttctagttcaaccatcaatctaatggtgagcacagaaccattggctctcactgaaacagatatatgcaagttgccgaaagacgaaggaacttgcagggatttcatattaaaatggtactatgatccaaacaccaaaagctgtgcaagattctggtatggaggttgtggtggaaacgaaaacaaatttggatcacagaaagaatgtgaaaaggtttgcgctcctgtgctcgccaaacccggagtcatcagtgtgatgggaacctaagcgtgggtggccaacatcatatacctcttgaagaagaaggagtcagccatcgccaacttgtctctgtagaagctccgggtgtagattcccttgcactgtatcatttcatgctttgatttacactcgaactcgggagggaacatcctgctgcatgacctatcagtatggtgctaatgtgtctgtggaccctcgctctctgtctccagcagttctctcgaatactttgaatgttgtgtaacagttagccactgctggtgtttatgtgaacattcctatcaatccaaattccctctggagtttcatgttatgcctgttgcaggcaaatgtaaagtctagaaaataatgcaaatgtcacggctactctatatacttttgcttggttcattttttttcccttttagttaagcatgactttagatgggaagcctgtgtatcgtggagaaacaagagaccaactttttcattccctgcccccaatttcccagactagatttcaagctaattttctttttctgaagcctctaacaaatgatctagttcagaaggaagcaaaatcccttaatctatgtgcaccgttgggaccaatgccttaattaaagaatttaaaaaagttgtaatagagaatatttttggcattcctctcaatgttgtgtgttttttttttttgtgtgctggagggaggggatttaattttaattttaaaatgtttaggaaatttatacaaagaaactttttaataaagtatattgaaagtttaaaaaaaaaaaaaaaa

SEQ ID NO: 52 - DNA, 2691 bp, Homo sapiens
  misc_feature: transforming growth factor, beta-induced
gcttgcccgtcggtcgctagctcgctcggtgcgcgtcgtcccgctccatggcgctcttcgtgcggctgctggctctcgccctggctctggccctgggccccgccgcgaccctggcgggtcccgccaagtcgccctaccagctggtgctgcagcacagcaggctccggggccgccagcacggccccaacgtgtgtgctgtgcagaaggttattggcactaataggaagtacttcaccaactgcaagcagtggtaccaaaggaaaatctgtggcaaatcaacagtcatcagctacgagtgctgtcctggatatgaaaaggtccctggggagaagggctgtccagcagccctaccactctcaaacctttacgagaccctgggagtcgttggatccaccaccactcagctgtacacggaccgcacggagaagctgaggcctgagatggaggggcccggcagcttcaccatcttcgcccctagcaacgaggcctgggcctccttgccagctgaagtgctggactccctggtcagcaatgtcaacattgagctgctcaatgccctccgctaccatatggtgggcaggcgagtcctgactgatgagctgaaacacggcatgaccctcacctctatgtaccagaattccaacatccagatccaccactatcctaatgggattgtaactgtgaactgtgcccggctcctgaaagccgaccaccatgcaaccaacggggtggtgcacctcatcgataaggtcatctccaccatcaccaacaacatccagcagatcattgagatcgaggacacctttgagacccttcgggctgctgtggctgcatcagggctcaacacgatgcttgaaggtaacggccagtacacgcttttggccccgaccaatgaggccttcgagaagatccctagtgagactttgaaccgtatcctgggcgacccagaagccctgagagacctgctgaacaaccacatcttgaagtcagctatgtgtgctgaagccatcgttgcggggctgtctgtagagaccctggagggcacgacactggaggtgggctgcagcggggacatgctcactatcaacgggaaggcgatcatctccaataaagacatcctagccaccaacggggtgatccactacattgatgagctactcatcccagactcagccaagacactatttgaattggctgcagagtctgatgtgtccacagccattgaccttttcagacaagccggcctcggcaatcatctctctggaagtgagcggttgaccctcctggctcccctgaattctgtattcaaagatggaacccctccaattgatgcccatacaaggaatttgcttcggaaccacataattaaagaccagctggcctctaagtatctgtaccatggacagaccctggaaactctgggcggcaaaaaactgagagtttttgtttatcgtaatagcctctgcattgagaacagctgcatcgcggcccacgacaagagggggaggtacgggaccctgttcacgatggaccgggtgctgacccccccaatggggactgtcatggatgtcctgaagggagacaatcgctttagcatgctggtagctgccatccagtctgcaggactgacggagaccctcaaccgggaaggagtctacacagtctttgctcccacaaatgaagccttccgagccctgccaccaagagaacggagcagactcttgggagatgccaaggaacttgccaacatcctgaaataccacattggtgatgaaatcctggttagcggaggcatcggggccctggtgcggctaaagtctctccaaggtgacaagctggaagtcagcttgaaaaacaatgtggtgagtgtcaacaaggagcctgttgccgagcctgacatcatggccacaaatggcgtggtccatgtcatcaccaatgttctgcagcctccagccaacagacctcaggaaagaggggatgaacttgcagactctgcgcttgagatcttcaaacaagcatcagcgttttccagggcttcccagaggtctgtgcgactagcccctgtctatcaaaagttattagagaggatgaagcattagcttgaagcactacaggaggaatgcaccacggcagctctccgccaatttctctcagatttccacagagactgtttgaatgttttcaaaaccaagtatcacactttaatgtacatgggccgcaccataatgagatgtgagccttgtgcatgtgggggaggagggagagagatgtactttttaaatcatgttccccctaaacatggctgttaacccactgcatgcagaaacttggatgtcactgcctgacattcacttccagagaggacctatcccaaatgtggaattgactgcctatgccaagtccctggaaaaggagcttcagtattgtggggctcataaaacatgaatcaagcaatccagcctcatgggaagtcctggcacagtttttgtaaagcccttgcacagctggagaaatggcatcattataagctatgagttgaaatgttctgtcaaatgtgtctcacatctacacgtggcttggaggcttttatggggccctgtccaggtagaaaagaaatggtatgtagagcttagatttccctattgtgacagagccatggtgtgtttgtaataataaaaccaaagaaacata

SEQ ID NO: 53 - DNA, 782 bp, Homo sapiens
  misc_feature: tissue inhibitor of metalloproteinase 1
aggggccttagcgtgccgcatcgccgagatccagcgcccagagagacaccagagaacccaccatggccccctttgagcccctggcttctggcatcctgttgttgctgtggctgatagcccccagcagggcctgcacctgtgtcccaccccacccacagacggccttctgcaattccgacctcgtcatcagggccaagttcgtggggacaccagaagtcaaccagaccaccttataccagcgttatgagatcaagatgaccaagatgtataaagggttccaagccttaggggatgccgctgacatccggttcgtctacacccccgccatggagagtgtctgcggatacttccacaggtcccacaaccgcagcgaggagtttctcattgctggaaaactgcaggatggactcttgcacatcactacctgcagtttcgtggctccctggaacagcctgagcttagctcagcgccggggcttcaccaagacctacactgttggctgtgaggaatgcacagtgtttccctgtttatccatcccctgcaaactgcagagtggcactcattgcttgtggacggaccagctcctccaaggctctgaaaagggcttccagtcccgtcaccttgcctgcctgcctcgggagccagggctgtgcacctggcagtccctgcggtcccagatagcctgaatcctgcccggagtggaactgaagcctgcacagtgtccaccctgttcccactcccatctttcttccggacaatgaaataaagagttaccacccagc

SEQ ID NO: 54 - DNA, 2627 bp, Homo sapiens
  misc_feature: v-myb myeloblastosis viral oncogene homolog (avian)-like 2
gctgacgccttcgagcgcggcccggggcccggagcggccggagcagcccgggtcctgaccccggcccggctcccgctccgggctctgccggcgggcgggcgagcgcggcgcggtccgggccggggggatgtctcggcggacgcgctgcgaggatctggatgagctgcactaccaggacacagattcagatgtgccggagcagagggatagcaagtgcaaggtcaaatggacccatgaggaggacgagcagctgagggccctggtgaggcagtttggacagcaggactggaagttcctggccagccacttccctaaccgcactgaccagcaatgccagtacaggtggctgagagttttgaatccagaccttgtcaaggggccatggaccaaagaggaagaccaaaaagtcatcgagctggttaagaagtatggcacaaagcagtggacactgattgccaagcacctgaagggccggctggggaagcagtgccgtgaacgctggcacaaccacctcaaccctgaggtgaagaagtcttgctggaccgaggaggaggaccgcatcatctgcgaggcccacaaggtgctgggcaaccgctgggccgagatcgccaagatgttgccagggaggacagacaatgctgtgaagaatcactggaactctaccatcaaaaggaaggtggacacaggaggcttcttgagcgagtccaaagactgcaagcccccagtgtacttgctgctggagctcgaggacaaggacggcctccagagtgcccagcccacggaaggccagggaagtcttctgaccaactggccctccgtccctcctaccataaaggaggaggaaaacagtgaggaggaacttgcagcagccaccacatcgaaggaacaggagcccatcggtacagatctggacgcagtgcgaacaccagagcccttggaggaattcccgaagcgtgaggaccaggaaggctccccaccagaaacgagcctgccttacaagtgggtggtggaggcagctaacctcctcatccccgctgtgggttctagcctctctgaagccctggacttgatcgagtcggaccctgatgcttggtgtgacctgagtaaatttgacctccctgaggaaccatctgcagaggacagtatcaacaacagcctagtgcagctgcaagcgtcacatcagcagcaagtcctgccaccccgccagccttccgccctggtgcccagtgtgaccgagtaccgcctggatggccacaccatctcagacctgagccggagcagccggggcgagctgatccccatctcccccagcactgaagtcgggggctctggcattggcacaccgccctctgtgctcaagcggcagaggaagaggcgtgtggctctgtcccctgtcactgagaatagcaccagtctgtccttcctggattcctgtaacagcctcacgcccaagagcacacctgttaagaccctgcccttctcgccctcccagtttctgaacttctggaacaaacaggacacattggagctggagagcccctcgctgacatccaccccagtgtgcagccagaaggtggtggtcaccacaccactgcaccgggacaagacacccctgcaccagaaacatgctgcgtttgtaaccccagatcagaagtactccatggacaacactccccacacgccaaccccgttcaagaacgccctggagaagtacggacccctgaagcccctgccacagaccccgcacctggaggaggacttgaaggaggtgctgcgttctgaggctggcatcgaactcatcatcgaggacgacatcaggcccgagaagcagaagaggaagcctgggctgcggcggagccccatcaagaaagtccggaagtctctggctcttgacattgtggatgaggatgtgaagctgatgatgtccacactgcccaagtctctatccttgccgacaactgccccttcaaactcttccagcctcaccctgtcaggtatcaaagaagacaacagcttgctcaaccagggcttcttgcaggccaagcccgagaaggcagcagtggcccagaagccccgaagccacttcacgacacctgcccctatgtccagtgcctggaagacggtggcctgcggggggaccagggaccagcttttcatgcaggagaaagcccggcagctcctgggccgcctgaagcccagccacacatctcggaccctcatcttgtcctgaggtgttgagggtgtcacgagcccattctcatgtttacaggggttgtgggggcagagggggtctgtgaatctgagagtcattcaggtgacctcctgcagggagccttctgccaccagcccctccccagactctcaggtggaggcaacagggccatgtgctgccctgttgccgagcccagctgtgggcggctcctggtgctaacaacaaagttccacttccaggtctgcctggttccctccccaaggccacagggagctccgtcagcttctcccaagcccacgtcaggcctggcctcatctcagaccctgcttaggatgggggatgtggccaggggtgctcctgtgctcaccctctcttggtgcatttttttggaagaataaaattgcctctctctttg

SEQ ID NO: 55 - DNA, 2370 bp, Homo sapiens
  misc_feature: serum/glucocorticoid regulated kinase
cacgagggagcgctaacgtctttctgtctccccgcggtggtgatgacggtgaaaactgaggctgctaagggcaccctcacttactccaggatgaggggcatggtggcaattctcatcgctttcatgaagcagaggaggatgggtctgaacgactttattcagaagattgccaataactcctatgcatgcaaacaccctgaagttcagtccatcttgaagatctcccaacctcaggagcctgagcttatgaatgccaacccttctcctccaccaagtccttctcagcaaatcaaccttggcccgtcgtccaatcctcatgctaaaccatctgactttcacttcttgaaagtgatcggaaagggcagttttggaaaggttcttctagcaagacacaaggcagaagaagtgttctatgcagtcaaagttttacagaagaaagcaatcctgaaaaagaaagaggagaagcatattatgtcggagcggaatgttctgttgaagaatgtgaagcaccctttcctggtgggccttcacttctctttccagactgctgacaaattgtactttgtcctagactacattaatggtggagagttgttctaccatctccagagggaacgctgcttcctggaaccacgggctcgtttctatgctgctgaaatagccagtgccttgggctacctgcattcactgaacatcgtttatagagacttaaaaccagagaatattttgctagattcacagggacacattgtccttactgatttcggactctgcaaggagaacattgaacacaacagcacaacatccaccttctgtggcacgccggagtatctcgcacctgaggtgcttcataagcagccttatgacaggactgtggactggtggtgcctgggagctgtcttgtatgagatgctgtatggcctgccgcctttttatagccgaaacacagctgaaatgtacgacaacattctgaacaagcctctccagctgaaaccaaatattacaaattccgcaagacacctcctggagggcctcctgcagaaggacaggacaaagcggctcggggccaaggatgacttcatggagattaagagtcatgtcttcttctccttaattaactgggatgatctcattaataagaagattactcccccttttaacccaaatgtgagtgggcccaacgagctacggcactttgaccccgagtttaccgaagagcctgtccccaactccattggcaagtcccctgacagcgtcctcgtcacagccagcgtcaaggaagctgccgaggctttcctaggcttttcctatgcgcctcccacggactctttcctctgaaccctgttagggcttggttttaaaggattttatgtgtgtttccgaatgttttagttagccttttggtggagccgccagctgacaggacatcttacaagagaatttgcacatctctggaagcttagcaatcttattgcacactgttcgctggaattttttgaagagcacattctcctcagtgagctcatgaggttttcatttttattcttccttccaacgtggtgctatctctgaaacgagcgttagagtgccgccttagacggaggcaggagtttcgttagaaagcggacctgttctaaaaaaggtctcctgcagatctgtctgggctgtgatgacgaatattatgaaatgtgccttttctgaagagattgtgttagctccaaagcttttcctatcgcagtgtttcagttctttattttcccttgtggatatgctgtgtgaaccgtcgtgtgagtgtggtatgcctgatcacagatggattttgttataagcatcaatgtgacacttgcaggacactacaacgtgggacattgtttgtttcttccatatttggaagataaatttatgtgtagacttttttgtaagatacggttaataactaaaatttattgaaatggtcttgcaatgactcgtattcagatgcctaaagaaagcattgctgctacaaatatttctatttttagaaagggtttttatggaccaatgccccagttgtcagtcagagccgttggtgtttttcattgtttaaaatgtcacctgtaaaatgggcattatttatgtttttttttttgcattcctgataattgtatgtattgtataaagaacgtctgtacattgggttataacactagtatatttaaacttacaggcttatttgtaatgtaaaccaccattttaatgtactgtaattaacatggttataatacgtacaatccttccctcatcccatcacacaactttttttgtgtgtgataaactgattttggtttgcaataaaaccttgaaaaataaaaaaaaaaaaaaaaaaaaaaa

SEQ ID NO: 56 - DNA, 1367 bp, Homo sapiens
  misc_feature: CD14 antigen
ccggccggccgaagagttcacaagtgtgaagcctgaagccgccgggtgccgctgtgtagaaagaagctaaagcacttccagagcctgctgagctcagaggttcggaagacttatcgaccatggagcgcgcgtcctgcttgttgctgctgctgctgccgctggtgcacgtctctgcgaccacgccagaaccttgtgagctggacgatgaagatttccgctgcgtctgcaacttctccgaacctcagcccgactggtccgaagccttccagtgtgtgtctgcagtagaggtggagatccatgccggcggtctcaacctagagccgtttctaaagcgcgtcgatgcggacgccgacccgcggcagtatgctgacacggtcaaggctctccgcgtgcggcggctcacagtgggagccgcacaggttcctgctcagctactggtaggcgccctgcgtgtgctagcgtactcccgcctcaaggaactgacgctcgaggacctaaagataaccggcaccatgcctccgctgcctctggaagccacaggacttgcactttccagcttgcgcctacgcaacgtgtcgtgggcgacagggcgttcttggctcgccgagctgcagcagtggctcaagccaggcctcaaggtactgagcattgcccaagcacactcgcctgccttttcctgcgaacaggttcgcgccttcccggcccttaccagcctagacctgtctgacaatcctggactgggcgaacgcggactgatggcggctctctgtccccacaagttcccggccatccagaatctagcgctgcgcaacacaggaatggagacgcccacaggcgtgtgcgccgcactggcggcggcaggtgtgcagccccacagcctagacctcagccacaactcgctgcgcgccaccgtaaaccctagcgctccgagatgcatgtggtccagcgccctgaactccctcaatctgtcgttcgctgggctggaacaggtgcctaaaggactgccagccaagctcagagtgctcgatctcagctgcaacagactgaacagggcgccgcagcctgacgagctgcccgaggtggataacctgacactggacgggaatcccttcctggtccctggaactgccctcccccacgagggctcaatgaactccggcgtggtcccagcctgtgcacgttcgaccctgtcggtgggggtgtcgggaaccctggtgctgctccaaggggcccggggctttgcctaagatccaagacagaataatgaatggactcaaactgccttggcttcaggggagtcccgtcaggacgttgaggacttttcgaccaattcaaccctttgccccacctttattaaaatcttaaac

SEQ ID NO: 57 - DNA, 1620 bp, Homo sapiens
  misc_feature: ribonuclease, RNase A family, 1
gaattccgggtttgaaaaggagttctagggaagaagagagttagttagcacatcaatgggagcagggctcttaccccacgtggtgttacatatatattattttcatacatggtttctggctcataagttccttagcccttgctatagtcttttgtgttcggtcttaagggcaggactgtactcttccctcacctttctaattgtgcatcttaagaccttccccagagagggtggtgccctgtagttgtgggaaggaatgctggcatcatgaagcttccataaaaacccgagaaacgagcttctggatagctggacacatggaggtcctggagggtggagcccagggaggcatggaagctccacagcccttcccccataccttaccctatttcctctgtatcctttgtaatatcctttatgataaaccagcaaatgtgtgtaaatgtttccctaaggtctgtggccactccagcaaattaattgaacctaaagagggggtcgtgggaaccccaacttgaagccagtcagtcagaagttctggatgtccagacttcagactggtgtctgaaagggtggaggcagtcttggggaccgagcccccaatctatgggatctgacactatctccagtagtgttggaattgagtcaccagcgtgtccactggttagtgtgtgagaaactccctaccattggtcacagaagtcttcttctgtgttgatagttgtagtgtgacagcagaggaaaaacaaagtcagaaagagttttcccgaacacacccaatttctccattttactatccatttccacaaacactgactacaatagaagtataaaaattactccactgcatcattcagctttccatctctctcagacaccaagctgcagatccaggtcactttgtaggtcaccacctagaggggaggaagacctcgctttggagagtgggaataaaacgctcgtggaaaagggtacacgcttttctgggaaagtgaggccaccatggctctggagaagtctcttgtccggctccttctgcttgtcctgatactgctggtgctgggctgggtccagccttccctgggcaaggaatcccgggccaagaaattccagcggcagcatatggactcagacagttcccccagcagcagctccacctactgtaaccaaatgatgaggcgccggaatatgacacaggggcggtgcaaaccagtgaacacctttgtgcacgagcccctggtagatgtccagaatgtctgtttccaggaaaaggtcacctgcaagaacgggcagggcaactgctacaagagcaactccagcatgcacatcacagactgccgcctgacaaacggctccaggtaccccaactgtgcataccggaccagcccgaaggagagacacatcattgtggcctgtgaagggagcccatatgtgccagtccactttgatgcttctgtggaggactctacctaaggtcagagcagcgagataccccacctccctcaacctcatcctctccacagctgcctcttccctcttccttccctgctgtgaaagaagtaactacagttagggctcctattcaacacacacatgcttccctttcctgagccggaattc

SEQ ID NO: 58 - DNA, 6837 bp, Homo sapiens
  misc_feature: fer-1-like 3, myoferlin (C. elegans)
ggcacgagcttctctcccagggcggtgcgacccggagctccagcgcccgagtctccacttcgtttgctgaaacttgctttctaccagctaagaaccatgctgcgagtgattgtggaatctgccagcaatatccctaaaacgaaatttggcaagccggatcctattgtttctgtcatttttaaggatgagaaaaagaaaacaaagaaagttgataatgaattgaaccctgtctggaatgagattttggagtttgacttgaggggtataccactggacttttcatcttcccttgggattattgtgaaagattttgagacaattggacaaaataaattaattggcacggcgactgtagccctgaaggacctgactggtgaccagagcagatccctgccgtacaagctgatctccctgctaaatgaaaaagggcaagatactggggccaccattgacttggtgatcggctatgatccgccttctgctccacatccaaatgacctgagcgggcccagcgtgccaggcatgggaggagatggggaagaagatgaaggtgatgaagacaggttggacaatgcagtcaggggccctgggcccaaggggccagttgggacggtgtcggaagctcagcttgctcggaggctcaccaaagtaaagaacagccggcggatgctgtcaaataagccacaggacttccagatccgcgtccgagtgattgagggccgacagttaagtggtaacaacataaggcctgtggtcaaagttcacgtctgtggccagacacaccgaacaagaatcaagagaggaaacaaccctttttttgatgagttgtttttctacaatgtcaacatgaccccttctgaattgatggatgagatcatcagcatccgggtttataattctcactctctgcgggcagattgtctgatgggggaatttaagattgatgttggatttgtttatgatgaacctggccatgctgtcatgagaaagtggcttcttctcaatgacccggaagataccagttcaggttctaaaggttatatgaaagtcagcatgtttgtcctgggaaccggagatgagcctcctcctgagagacgagatcgtgataatgacagtgatgatgtggagagtaatttgttactccctgctggcattgccctccggtgggtgaccttcttgctgaaaatctaccgagctgaggacatcccccagatggatgatgccttctcacagacagtaaaggaaatatttggaggcaatgcagataagaaaaatctcgtggatccttttgtagaagtttcctttgctggaaaaaaggtttgtacaaacataattgagaaaaatgcaaacccagagtggaatcaggtcgtcaatcttcagatcaagtttccttcagtgtgtgaaaaaataaaactaacaatatatgactgggaccgtcttactaaaaatgatgtagttggaacaacatatctacacctctctaaaattgctgcctctggtggggaagtggaagatttctcatcttcgggaactggggctgcatcatatacagtaaacacaggagaaacagaggtaggctttgttccaacgtttggaccttgttacctgaatctttatggaagccccagggagtacacgggattcccagacccctatgatgagctgaatactggaaagggggaaggagttgcctacagaggcaggatcttggttgaattagccacttttcttgagaagacaccaccagataaaaagcttgagcccatttcaaatgatgacctgctggttgttgagaaataccagcgaaggcggaagtacagcctgtctgccgtgtttcattcagccaccatgttgcaagatgttggtgaggccattcagtttgaagtcagcattgggaactatggcaacaagtttgacaccacctgtaagcctttggcatcaacaactcagtacagccgtgctgtatttgatggcaactactattattacttgccttgggcccacaccaagccagttgttaccctgacttcatactgggaggatattagtcatcgcctggatgcggtgaacactctcctagctatggcagaacggctgcaaacaaatatagaagctctaaaatcagggatacaaggtaaaattcctgcaaaccagctggctgaattgtggctgaagctgatagatgaagttatagaagacacgagatacacgttgcctctcacagaaggaaaagccaacgtcacagttctcgatactcagatccgaaagctgcggtccaggtctctctcccaaatacatgaggcggctgtgaggatgaggtcggaagccacagatgtgaagtccacactggcagaaattgaggactggcttgataaattaatgcagctgactgaagagccacagaacagcatgcctgacatcatcatctggatgatccggggagagaagagactggcctatgcacgaattcccgcacatcaggtcttgtactccaccagtggtgagaatgcatctggaaaatactgtgggaaaacccaaaccatctttctgaagtatccacaggagaaaaacaacgggccaaaggtgcctgtggagttgcgagtgaacatctggctaggcttaagtgctgtggagaagaagtttaacagcttcgcagaaggaactttcaccgtctttgctgaaatgtatgaaaatcaagctctcatgtttggaaaatggggtacttctggattagtaggacgtcataagttttctgatgtcacaggaaaaataaaactcaagagggaattttttctgcctccaaaaggctgggaatgggaaggagagtggatagttgatcctgaaagaagcttgctgactgaggcagatgcaggtcacacggagttcactgatgaagtctatcagaacgagagccgctaccccgggggcgactggaagccggccgaggacacctacacggatgcgaacggcgataaagcagcatcacccagcgagttgacttgtcctccaggttgggaatgggaagatgatgcatggtcttatgacataaatcgagcggtggatgagaaaggctgggaatatggaatcaccattcctcctgatcataagcccaaatcctgggttgcagcagagaaaatgtaccacactcatagacggcgaaggctggtccgaaaacgcaagaaagatttaacacagactgcttcaagcaccgcaagggccatggaggaattgcaagaccaagagggctgggaatatgcttctctaattggctggaaatttcactggaaacaacgtagttcagataccttccgccgcagacgctggaggagaaaaatggctccttcagaaacacatggtgcagctgccatctttaaacttgaaggtgcccttggggcagacactaccgaagatggggatgagaagagcctggagaaacagaagcacagtgccaccactgtgttcggagcaaacacccccattgtttcctgcaattttgacagagtctacatctaccatctgcgctgctatgtctatcaagccagaaacctcttggctttagataaggatagcttttcagatccatatgctcatatctgtttcctccatcggagcaaaaccactgagatcatccattcaaccctgaatcccacgtgggaccaaacaattatattcgatgaagttgaaatctatggggaaccccaaacagttctacagaatccacccaaagttatcatggaactttttgacaatgaccaagtgggcaaagatgaatttttaggacgaagcattttctctcctgtggtgaaactgaactcagaaatggacatcacacccaaacttctctggcacccagtaatgaatggagacaaagcctgcggggatgttcttgtaactgcagagctgattctgaggggcaaggatggctccaaccttcccattcttccccctcaaagggcgccaaatctatacatggtcccccaggggatcaggcctgtggtccagctcactgccattgagattctagcttggggcttaagaaatatgaaaaacttccagatggcttctatcacatcccccagtcttgttgtggagtgtggaggagaaagggtggaatcggtggtgatcaaaaaccttaagaagacacccaactttccaagttctgttctcttcatgaaagtgttcttgcccaaggaggaattgtacatgcccccactggtgatcaaggtcatcgaccacaggcagtttgggcggaagcctgtcgtcggccagtgcaccatcgagcgcctggaccgctttcgctgtgacccttatgcagggaaagaggacatcgtcccacagctcaaagcctcccttctgtctgccccaccatgccgggacatcgttatcgaaatggaagacaccaaaccattactggcttctaagctgacagaaaaggaggaagaaatcgtggactggtggagtaaattttatgcttcctcaggggaacatgaaaaatgcggacagtatattcagaaaggctattccaagctcaagatatataattgtgaactagaaaatgtagcagaatttgagggcctgacagacttctcagatacgttcaagttgtaccgaggcaagtcggatgaaaatgaagatccttctgtggttggagagtttaagggctcctttcggatctaccctctgccggatgaccccagcgtgccagcccctcccagacagtttcgggaattacctgacagcgtcccacaggaatgcacggttaggatttacattgttcgaggcttagagctccagccccaggacaacaatggcctgtgtgacccttacataaaaataacactgggcaaaaaagtcattgaagaccgagatcactacattcccaacactctcaacccagtctttggcaggatgtacgaactgagctgctacttacctcaagaaaaagacctgaaaatttctgtctatgattatgacacctttacccgggatgaaaaagtaggagaaacaattattgatctggaaaaccgattcctttcccgctttgggtcccactgcggcataccagaggagtactgtgtttctggagtcaatacctggcgagatcaactgagaccaacacagctgcttcaaaatgtcgccagattcaaaggcttcccacaacccatcctttccgaagatgggagtagaatcagatatggaggacgagactacagcttggatgaatttgaagccaacaaaatcctgcaccagcacctcggggcccctgaagagcggcttgctcttcacatcctcaggactcaggggctggtccctgagcacgtggaaacaaggactttgcacagcaccttccagcccaacatttcccagggaaaacttcagatgtgggtggatgttttccccaagagtttggggccaccaggccctcctttcaacatcacaccccggaaagccaagaaatactacctgcgtgtgatcatctggaacaccaaggacgttatcttggacgagaaaagcatcacaggagaggaaatgagtgacatctacgtcaaaggctggattcctggcaatgaagaaaacaaacagaaaacagatgtccattacagatctttggatggtgaagggaattttaactggcgatttgttttcccgtttgactaccttccagccgaacaactctgtatcgttgcgaaaaaagagcatttctggagtattgaccaaacggaatttcgaatcccacccaggctgatcattcagatatgggacaatgacaagttttctctggatgactacttgggtttcctagaacttgacttgcgtcacacgatcattcctgcaaaatcaccagagaaatgcaggttggacatgattccggacctcaaagccatgaacccccttaaagccaagacagcctccctctttgagcagaagtccatgaaaggatggtggccatgctacgcagagaaagatggcgcccgcgtaatggctgggaaagtggagatgacattggaaatcctcaacgagaaggaggccgacgagaggccagccgggaaggggcgggacgaacccaacatgaaccccaagctggacttaccaaatcgaccagaaacctccttcctctggttcaccaacccatgcaagaccatgaagttcatcgtgtggcgccgctttaagtgggtcatcatcggcttgctgttcctgcttatcctgctgctcttcgtggccgtgctcctctactctttgccgaactatttgtcaatgaagattgtaaagccaaatgtgtaacaaaggcaaaggcttcatttcaagagtcatccagcaatgagagaatcctgcctctgtagaccaacatccagtgtgattttgtgtctgagaccacaccccagtagcaggttacgccatgtcaccgagccccattgattcccagagggtcttagtcctggaaagtcaggccaacaagcaacgtttgcatcatgttatctcttaagtattaaaagttttattttctaaagtttaaatcatgtttttcaaaatatttttcaaggtggctggttccatttaaaaatcatctttttatatgtgtcttcggttctagacttcagcttttggaaattgctaaatagaattcaaaaatctctgcatcctgaggtgatatacttcatatttgtaatcaactgaaagagctgtgcattataaaatcagttagaatagttagaacaattcttatttatgcccacaaccattgctatattttgtatggatgtcataaaagtctatttaacctctgtaatgaaactaaataaaaatgtttcacctttaaaaaaaaaaaaaaaaaaaaaa

SEQ ID NO: 59 - DNA, 3142 bp, Homo sapiens
  misc_feature: endoglin (Osler-Rendu-Weber syndrome 1) (Homo sapiens)
cctgggccggccgggctggatgagccgggagctccctgctgccggtcataccacagccttcatctgcgccctggggccaggactgctgctgtcactgccatccattggagcccagcaccccctccccgcccatccttcggacagcaactccagcccagccccgcgtccctgtgtccacttctcctgacccctcggccgccaccccagaaggctggagcagggacgccgtcgctccggccgcctgctcccctcgggtccccgtgcgagcccacgccggccccggtgcccgcccgcagccctgccactggacacaggataaggcccagcgcacaggcccccacgtggacagcatggaccgcggcacgctccctctggctgttgccctgctgctggccagctgcagcctcagccccacaagtcttgcagaaacagtccattgtgaccttcagcctgtgggccccgagaggggcgaggtgacatataccactagccaggtctcgaagggctgcgtggctcaggcccccaatgccatccttgaagtccatgtcctcttcctggagttcccaacgggcccgtcacagctggagctgactctccaggcatccaagcaaaatggcacctggccccgagaggtgcttctggtcctcagtgtaaacagcagtgtcttcctgcatctccaggccctgggaatcccactgcacttggcctacaattccagcctggtcaccttccaagagcccccgggggtcaacaccacagagctgccatccttccccaagacccagatccttgagtgggcagctgagaggggccccatcacctctgctgctgagctgaatgacccccagagcatcctcctccgactgggccaagcccaggggtcactgtccttctgcatgctggaagccagccaggacatgggccgcacgctcgagtggcggccgcgtactccagccttggtccggggctgccacttggaaggcgtggccggccacaaggaggcgcacatcctgagggtcctgccgggccactcggccgggccccggacggtgacggtgaaggtggaactgagctgcgcacccggggatctcgatgccgtcctcatcctgcagggtcccccctacgtgtcctggctcatcgacgccaaccacaacatgcagatctggaccactggagaatactccttcaagatctttccagagaaaaacattcgtggcttcaagctcccagacacacctcaaggcctcctgggggaggcccggatgctcaatgccagcattgtggcatccttcgtggagctaccgctggccagcattgtctcacttcatgcctccagctgcggtggtaggctgcagacctcacccgcaccgatccagaccactcctcccaaggacacttgtagcccggagctgctcatgtccttgatccagacaaagtgtgccgacgacgccatgaccctggtactaaagaaagagcttgttgcgcatttgaagtgcaccatcacgggcctgaccttctgggaccccagctgtgaggcagaggacaggggtgacaagtttgtcttgcgcagtgcttactccagctgtggcatgcaggtgtcagcaagtatgatcagcaatgaggcggtggtcaatatcctgtcgagctcatcaccacagcggaaaaaggtgcactgcctcaacatggacagcctctctttccagctgggcctctacctcagcccacacttcctccaggcctccaacaccatcgagccggggcagcagagctttgtgcaggtcagagtgtccccatccgtctccgagttcctgctccagttagacagctgccacctggacttggggcctgagggaggcaccgtggaactcatccagggccgggcggccaagggcaactgtgtgagcctgctgtccccaagccccgagggtgacccgcgcttcagcttcctcctccacttctacacagtacccatacccaaaaccggcaccctcagctgcacggtagccctgcgtcccaagaccgggtctcaagaccaggaagtccataggactgtcttcatgcgcttgaacatcatcagccctgacctgtctggttgcacaagcaaaggcctcgtcctgcccgccgtgctgggcatcacctttggtgccttcctcatcggggccctgctcactgctgcactctggtacatctactcgcacacgcgtgagtaccccaggcccccacagtgagcatgccgggcccctccatccacccgggggagcccagtgaagcctctgagggattgaggggccctggcaggaccctgacctccgcccctgcccccgctcccgctcccaggttcccccagcaagcgggagcccgtggtggcggtggctgccccggcctcctcggagagcagcagcaccaaccacagcatcgggagcacccagagcaccccctgctccaccagcagcatggcatagccccggccccccgcgctcgcccagcaggagagactgagcagccgccagctgggagcactggtgtgaactcaccctgggagccagtcctccactcgacccagaatggagcctgctctccgcgcctacccttcccgcctccctctcagaggcctgctgccagtgcagccactggcttggaacaccttggggtccctccaccccacagaaccttcaacccagtgggtctgggatatggctgcccaggagacagaccacttgccacgctgttgtaaaaacccaagtccctgtcatttgaacctggatccagcactggtgaactgagctgggcaggaagggagaacttgaaacagattcaggccagcccagccaggccaacagcacctccccgctgggaagagaagagggcccagcccagagccacctggatctatccctgcggcctccacacctgaacttgcctaactaactggcaggggagacaggagcctagcggagcccagcctgggagcccagagggtggcaagaacagtgggcgttgggagcctagctcctgccacatggagccccctctgccggtcgggcagccagcagagggggagtagccaagctgcttgtcctgggcctgcccctgtgtattcaccaccaataaatcagaccatgaaacctgaaaaaaaaaaaaa

SEQ ID NO: 60 - DNA, 1535 bp, Homo sapiens
  misc_feature: BCL2/adenovirus E1B 19kDa interacting protein 3 (Homo sapiens)
cctccgctcagtccgggagcgcacgtgggccgcggcgctccgacctccgctttcccaccgcccgcagctgaagcacatcccgcagcccggcgcggactccgatcgccgcagttgccctctggcgccatgtcgcagaacggagcgcccgggatgcaggaggagagcctgcagggctcctgggtagaactgcacttcagcaataatgggaacgggggcagcgttccagcctcggtttctatttataatggagacatggaaaaaatactgctggacgcacagcatgagtctggacggagtagctccaagagctctcactgtgacagcccacctcgctcgcagacaccacaagataccaacagggcttctgaaacagatacccatagcattggagagaaaaacagctcacagtctgaggaagatgatattgaaagaaggaaagaagttgaaagcatcttgaagaaaaactcagattggatatgggattggtcaagtcggccggaaaatattccccccaaggagttcctctttaaacacccgaagcgcacggccaccctcagcatgaggaacacgagcgtcatgaagaaagggggcatattctctgcagaatttctgaaagttttccttccatctctgctgctctctcatttgctggccatcggattggggatctatattggaaggcgtctgacaacctccaccagcaccttttgatgaagaactggagtctgacttggttcgttagtggattacttctgagcttgcaacatagctcactgaagagctgttagatcctggggtggccacgtcacttgtgtttatttgttctgtaaatgctgcgttcctaatttagtaaaataaaagaatagacactaaaatcatgttgatctataattacacctatgggatcaataagcatgtcagactgattaatgtctactgtgaaaatttggtagtaaattttcatttgatattagatataaatatctgaatataaataattttaatatactagtcatgatgtgtgttgtattttaaaaattatctgcaaccttaattcagctgaagtactttatatttcaaaagaatgaataacattgataataaaatcgctactttaaggggtttgtccaaaataaatattgtggccttatatatcacactattgtagaaagtattatttaatttaaatggatgcaggttgtctactaaagaaagattatatataactatgctaattgttcataatcaacagaaaccaagatagagctacaaactcagctgtacagttcgtacactaaactcttcttgcttttgcattataaggaattaagtctccgattattaggtgatcaccctggatgatcagttttctgctgaaggcacctactcagtatcttttcctctttatcactctgcattggtgaatttaatcctctcctttgtgttcaacttttgtgtgcttttaaaatcagctttattctaagcaaatctgtgtctactttaaaaaactggaaatggaaaaaaaaataaatctt

SEQ ID NO: 61 - DNA, 717 bp, Homo sapiens
  misc_feature: CDC28 protein kinase regulatory subunit 1B (Homo sapiens)
agagcgatcatgtcgcacaaacaaatttactattcggacaaatacgacgacgaggagtttgagtatcgacatgtcatgctgcccaaggacatagccaagctggtccctaaaacccatctgatgtctgaatctgaatggaggaatcttggcgttcagcagagtcagggatgggtccattatatgatccatgaaccagaacctcacatcttgctgttccggcgcccactacccaagaaaccaaagaaatgaagctggcaagctacttttcagcctcaagctttacacagctgtccttacttcctaacatctttctgataacattattatgttgccttcttgtttctcactttgatatttaaaagatgttcaatacactgtttgaatgtgctggtaactgctttgcttcttgagtagagccaccaccaccatagcccagccagatgagtgctctgtggacccacagcctaagctgagtgtgaccccagaagccacgatgtgctctgtatccagaacacacttggcagatggaggaagcatctgagtttgagaccatggctgttacagggatcatgtaaacttgctgtttttgttttttctgccgggtgttgtatgtgtggtgacttgcggatttatgtttcagtgtactggaaactttccattttattcaagaaatctgttcatgttaaaagccttgattaaagaggaagtttttataat

SEQ ID NO: 62 - DNA, 2938 bp, Homo sapiens
  misc_feature: protein tyrosine phosphatase, non-receptor type 12 (Homo sapiens)
gccggggggacgcgggaggatggagcaagtggagatcctgaggaaattcatccagagggtccaggccatgaagagtcctgaccacaatggggaggacaacttcgcccgggacttcatgcggttaagaagattgtctaccaaatatagaacagaaaagatatatcccacagccactggagaaaaagaagaaaatgttaaaaagaacagatacaaggacatactgccatttgatcacagccgagttaaattgacattaaagactccttcacaagattcagactatatcaatgcaaattttataaagggcgtctatgggccaaaagcatatgtagcaactcaaggacctttagcaaatacagtaatagatttttggaggatggtatgggagtataatgttgtgatcattgtaatggcctgccgagaatttgagatgggaaggaaaaaatgtgagcgctattggcctttgtatggagaagaccccataacgtttgcaccatttaaaatttcttgtgaggatgaacaagcaagaacagactacttcatcaggacactcttacttgaatttcaaaatgaatctcgtaggctgtatcagtttcattatgtgaactggccagaccatgatgttccttcatcatttgattctattctggacatgataagcttaatgaggaaatatcaagaacatgaagatgttcctatttgtattcattgcagtgcaggctgtggaagaacaggtgccatttgtgccatagattatacgtggaatttactaaaagctgggaaaataccagaggaatttaatgtatttaatttaatacaagaaatgagaacacaaaggcattctgcagtacaaacaaaggagcaatatgaacttgttcatagagctattgcccaactgtttgaaaaacagctacaactatatgaaattcatggagctcagaaaattgctgatggagtgaatgaaattaacactgaaaacatggtcagctccatagagcctgaaaaacaagattctcctcctccaaaaccaccaaggacccgcagttgccttgttgaaggggatgctaaagaagaaatactgcagccaccggaacctcatccagtgccacccatcttgacaccttctcccccttcagcttttccaacagtcactactgtgtggcaggacaatgatagataccatccaaagccagtgttgcatatggtttcatcagaacaacattcagcagacctcaacagaaactatagtaaatcaacagaacttccagggaaaaatgaatcaacaattgaacagatagataaaaaattggaacgaaatttaagttttgagattaagaaggtccctctccaagagggaccaaaaagttttgatgggaacacacttttgaataggggacatgcaattaaaattaaatctgcttcaccttgtatagctgataaaatctctaagccacaggaattaagttcagatctaaatgtcggtgatacttcccagaattcttgtgtggactgcagtgtaacacaatcaaacaaagtttcagttactccaccagaagaatcccagaattcagacacacctccaaggccagaccgcttgcctcttgatgagaaaggacatgtaacgtggtcatttcatggacctgaaaatgccatacccatacctgatttatctgaaggcaattcctcagatatcaactatcaaactaggaaaactgtgagtttaacaccaagtcctacaacacaagttgaaacacctgatcttgtggatcatgataacacttcaccactcttcagaacacccctcagttttactaatccacttcactctgatgactcagactcagatgaaagaaactctgatggtgctgtgacccagaataaaactaatatttcaacagcaagtgccacagtttctgctgccactagtactgaaagcatttctactaggaaagtattgccaatgtccattgctagacataatatagcaggaacaacacattcaggtgctgaaaaagatgttgatgttagtgaagattcacctcctcccctacctgaaagaactcctgaatcgtttgtgttagcaagtgaacataatacacctgtaagatcggaatggagtgaacttcaaagtcaggaacgatctgaacaaaaaaagtctgaaggcttgataacctctgaaaatgagaaatgtgatcatccagcgggaggtattcactatgaaatgtgcatagaatgtccacctactttcagtgacaagagagaacaaatatcagaaaatccaacagaagccacagatattggttttggtaatcgatgtggaaaacccaaaggaccaagagatccaccttcagaatggacatgattcagggagctagaagacactttaagttatactggaaaattcaggtgccactgaaagccagatttatagtattccatctttaatatgtgggactaacagcagtgtagattgttaccttaatattttttgctgggaccatctacctgccttatactacacttaggaaaaagtattacatatggtttattttgaaacttcaagtattattgccttaatgtctcttaaccctgttacacgctgcttgtagacatgttaatatagtaatacctttatgatatattgagtttaaggactaccctttttctgttttatcatgtattcattattttgtatatgtacagggcaagtaggtatataatttgataaagttgcaattgaaatattattaacagaagatgtaagaaatttctgcatggtctaaatctttgtgtactttatttgtaaattatttgccctggagttttagaaaatagtttctgaattttaaacttgctggattcatgcagccagctttgcaggttatcagagatcaaagattgtaataataattttgtaaattgtaagcaaacattctgc

SEQ ID NO: 63 - DNA, 1575 bp, Homo sapiens
  misc_feature: cathepsin L (Homo sapiens)
agaaccgcgacctccgcaaccttgagcggcatccgtggagtgcgcctgcagctacgaccgcagcaggaaagcgccgccggccaggcccagctgtggccggacagggactggaagagaggacgcggtcgagtaggtgtgcaccagccctggcaacgagagcgtctaccccgaactctgctggccttgaggtggggaagccggggagggcagttgaggaccccgcggaggcgcgtgactggttgagcgggcaggccagcctccgagccgggtggacacaggttttaaaacatgaatcctacactcatccttgctgccttttgcctgggaattgcctcagctactctaacatttgatcacagtttagaggcacagtggaccaagtggaaggcgatgcacaacagattatacggcatgaatgaagaaggatggaggagagcagtgtgggagaagaacatgaagatgattgaactgcacaatcaggaatacagggaagggaaacacagcttcacaatggccatgaacgcctttggagacatgaccagtgaagaattcaggcaggtgatgaatggctttcaaaaccgtaagcccaggaaggggaaagtgttccaggaacctctgttttatgaggcccccagatctgtggattggagagagaaaggctacgtgactcctgtgaagaatcagggtcagtgtggttcttgttgggcttttagtgctactggtgctcttgaaggacagatgttccggaaaactgggaggcttatctcactgagtgagcagaatctggtagactgctctgggcctcaaggcaatgaaggctgcaatggtggcctaatggattatgctttccagtatgttcaggataatggaggcctggactctgaggaatcctatccatatgaggcaacagaagaatcctgtaagtacaatcccaagtattctgttgctaatgacaccggctttgtggacatccctaagcaggagaaggccctgatgaaggcagttgcaactgtggggcccatttctgttgctattgatgcaggtcatgagtccttcctgttctataaagaaggcatttattttgagccagactgtagcagtgaagacatggatcatggtgtgctggtggttggctacggatttgaaagcacagaatcagataacaataaatattggctggtgaagaacagctggggtgaagaatggggcatgggtggctacgtaaagatggccaaagaccggagaaaccattgtggaattgcctcagcagccagctaccccactgtgtgagctggtggacggtgatgaggaaggacttgactggggatggcgcatgcatgggaggaattcatcttcagtctaccagcccccgctgtgtcggatacacactcgaatcattgaagatccgagtgtgatttgaattctgtgatattttcacactggtaaatgttacctctattttaattactgctataaataggtttatattattgattcacttactgactttgcattttcgtttttaaaaggatgtataaatttttacctgtttaaataaaatttaatttcaaatgt

SEQ ID NO: 64 - DNA, 1619 bp, Homo sapiens
  misc_feature: baculoviral IAP repeat-containing 5 (survivin) (Homo sapiens)
ccgccagatttgaatcgcgggacccgttggcagaggtggcggcggcggcatgggtgccccgacgttgccccctgcctggcagccctttctcaaggaccaccgcatctctacattcaagaactggcccttcttggagggctgcgcctgcaccccggagcggatggccgaggctggcttcatccactgccccactgagaacgagccagacttggcccagtgtttcttctgcttcaaggagctggaaggctgggagccagatgacgaccccatagaggaacataaaaagcattcgtccggttgcgctttcctttctgtcaagaagcagtttgaagaattaacccttggtgaatttttgaaactggacagagaaagagccaagaacaaaattgcaaaggaaaccaacaataagaagaaagaatttgaggaaactgcgaagaaagtgcgccgtgccatcgagcagctggctgccatggattgaggcctctggccggagctgcctggtcccagagtggctgcaccacttccagggtttattccctggtgccaccagccttcctgtgggccccttagcaatgtcttaggaaaggagatcaacattttcaaattagatgtttcaactgtgctcctgttttgtcttgaaagtggcaccagaggtgcttctgcctgtgcagcgggtgctgctggtaacagtggctgcttctctctctctctctcttttttgggggctcatttttgctgttttgattcccgggcttaccaggtgagaagtgagggaggaagaaggcagtgtcccttttgctagagctgacagctttgttcgcgtgggcagagccttccacagtgaatgtgtctggacctcatgttgttgaggctgtcacagtcctgagtgtggacttggcaggtgcctgttgaatctgagctgcaggttccttatctgtcacacctgtgcctcctcagaggacagtttttttgttgttgtgtttttttgttttttttttttggtagatgcatgacttgtgtgtgatgagagaatggagacagagtccctggctcctctactgtttaacaacatggctttcttattttgtttgaattgttaattcacagaatagcacaaactacaattaaaactaagcacaaagccattctaagtcattggggaaacggggtgaacttcaggtggatgaggagacagaatagagtgataggaagcgtctggcagatactccttttgccactgctgtgtgattagacaggcccagtgagccgcggggcacatgctggccgctcctccctcagaaaaaggcagtggcctaaatcctttttaaatgacttggctcgatgctgtgggggactggctgggctgctgcaggccgtgtgtctgtcagcccaaccttcacatctgtcacgttctccacacgggggagagacgcagtccgcccaggtccccgctttctttggaggcagcagctcccgcagggctgaagtctggcgtaagatgatggatttgattcgccctcctccctgtcatagagctgcagggtggattgttacagcttcgctggaaacctctggaggtcatctcggctgttcctgagaaataaaaagcctgtcatttc

SEQ ID NO: 65 - DNA, 3379 bp, Homo sapiens
  misc_feature: MCM2 minichromosome maintenance deficient 2, mitotin (S. cerevisiae)
aattccgcggaatcatcggaatccttcaccatggcatccagcccggcccagcgtcggcgaggcaatgatcctctcacctccagccctggccgaagctcccggcgtactgatgccctcacctccagccctggccgtgaccttccaccatttgaggatgagtccgaggggctcctaggcacagaggggcccctggaggaagaagaggatggagaggagctcattggagatggcatggaaagggactaccgcgccatcccagagctggacgcctatgaggccgagggactggctctggatgatgaggacgtagaggagctgacggccagtcgaagggaggcagcagacgggccatgcggcacggtgaccgggagctggccggggctgggcgcatgcgccgtgggctcctgtatgacagcgatgaggaggacgaggagcgccctgcccgcaagcgccgccagtggagccggcacggaggacggcgaggaggacgagcagatgattgagagcatcgagaacctggaggatctcaaaggccactctgtgcgcgagtgggtgagcatggcgggcccccggctggagatccaccaccgcttcaagaacttcctgcgcactcacgtcgacagccacggccacaacgtcttcaaggagcgcatcagcgacatgtgcaaagagaaccgtgagagcctggtggtgaactatgaggacttggcagccagggagcacgtgctggcctacttcctgcctgaggcaccggcggagctgctgcagatctttgatgaggctgccctggaggtggtactggccatgtaccccaagtacgaccgcatcaccaaccacatccatgtccgcatctcccacctgcctctggtggaggagctgcgctcgctgaggcagctgcatctgaaccagctgatccgcaccagtggggtggtgaccagctgcactggcgtcctgccccagctcagcatggtcaagtacaactgcaacaagtgcaatttcgtcctgggtcctttctgccagtcccagaaccaggaggtgaaaccaggctcctgtcctgagtgccagtcggccggcccctttgaggtcaacatggaggagaccatctatcagaactaccagcgtatccgaatccaggagagtccaggcaaagtggcggctcggcggctgccccgctccaaggacgccattctcctcgcagatctggtggacagctgcaacgcaggagacgagatagagctgactggcatctatcacaacaactatgatggctccctcaacactgccaatggcttccctgtctttgccactgtcatcctagccaaccacgtggccaagaaggacaacaaggttgctgtaggggaactgaccgatgaagatgtgaagatgatcactagcctctccaaggatcagcagatcggagagaagatctttgccagcattgctccttccatctatggtcatgaagacatcaagagaggccctgctctggccctgttcggaggggagcccaaaaacccaggtggcaagcacaaggtacgtggtgatatcaacgtgctcttgtgcggagaccctggcacagcgaagtcgcagtttctcaagtatattgagaaagtgtccagccgagccatcttcaccactggccagggggcgtcggctgtggccgtcacggcgtatgtccagcggcaccctgtcagcagggagtggaccttggaggctggggccctggttctggctgaccgaggagtgtgtctcattgatgaatttgacaagatgaatgaccaggacagaaccagcatccatgaggccatggagcaacagagcatctccatctcgaaggctggcatcgtcacctccctgcaggctcgctgcacggtcattgctgccgccaaccccataggagggcgctacgacccctcgctgactttctctgagaacgtggacctcacagagcccatcatctcacgctttgacatcctgtgtgtggtgagggacaccgtggacccagtccaggacgagatgctggcccgcttcgtggtgggcagccacgtcagacaccaccccagcaacaaggaggaggaggggctggccaatggcagcgctgctgagcccgccatgcccaacacgtatggcgtggagcccctgccccaggaggtcctgaagaagtacatcatctacgccaaggagagggtccacccgaagctcaaccagatggaccaggacaaggtggccaagatgtacagtgacctgaggaaagaatctatggcgacaggcagcatccccattacggtgcggcacatcgagtccatgagtcatggcggaggcccacgcgcgcatccatctgcgggactatgtgatcgaagacgacgtcaacatggccatccgcgtgatgctggagagcttcatagacacacagaagttcagcgtcatcgcagcatgcgcaagacttttgcccgctacctttcattccggcgtgacaacaatgagctgttgctcttcatactgaagcagttagtggcagagcaggtgacatatcagcgcaaccgctttggggcccagcaggacactattgaggtccctgagaaggacttggtggataaggctcgtcagatcaacatccacaacctctctgcattttatgacagtgagctcttcaggatgaacaagttcagccacgacctgaaaaggaaaatgatcctgcagcagttctgaggccctatgccatccataaggattccttgggattctggtttggggtggtcagtgccctctgtgctttatggacacaaaaccagagcacttgatgaactcggggtactagggtcagggcttatagcaggatgtctggctgcacctggcatgactgtttgtttctccaagcctgctttgtgcttctcacctttgggtgggatgccttgccagtgtgtcttacttggttgctgaacatcttgccacctccgagtgctttgtctccactcagtaccttggatcagagctgctgagttcaggatgcctgcgtgtggtttaggtgttagccttcttacatggatgtcaggagagctgctgccctcttggcgtgagttgcgtattcaggctgcttttgctcgctttggccagagagctggttgaagatgtttgtaatcgttttcagtctcctgcaggtttctgtgcccctgtggtggaagaggcacgacagtgccagcgcagcgttctgggctcctcagtcgcaggggtgggatgtgagtcatgcggattatccactcgccacagttatcagctgccattgctccctgtctgtttccccactctcttatttgtgcattcggtttggtttctgtagttttaatttttaataaagttgaataaaatataaaaaaaaaaa

SEQ ID NO: 66 - DNA, 8014 bp, Homo sapiens
  misc_feature: growth arrest-specific 7(Homo sapiens)
  misc_feature (1050)..(1050): n is a, c, g, or t
  misc_feature (2245)..(2245): n is a, c, g, or t
  misc_feature (2779)..(2779): n is a, c, g, or t
  misc_feature (2935)..(2935): n is a, c, g, or t
  misc_feature (3043)..(3049): n is a, c, g, or t
  misc_feature (3051)..(3051): n is a, c, g, or t
  misc_feature (3055)..(3055): n is a, c, g, or t
  misc_feature (3199)..(3199): n is a, c, g, or t
  misc_feature (3715)..(3715): n is a, c, g, or t
  misc_feature (4031)..(4031): n is a, c, g, or t
  misc_feature (5234)..(5234): n is a, c, g, or t
  misc_feature (5274)..(5274): n is a, c, g, or t
  misc_feature (5453)..(5453): n is a, c, g, or t
  misc_feature (5464)..(5465): n is a, c, g, or t
  misc_feature (5468)..(5468): n is a, c, g, or t
  misc_feature (5470)..(5470): n is a, c, g, or t
  misc_feature (5472)..(5472): n is a, c, g, or t
  misc_feature (6013)..(6013): n is a, c, g, or t
  misc_feature (6485)..(6485): n is a, c, g, or t
  misc_feature (6959)..(6959): n is a, c, g, or t
  misc_feature (7484)..(7484): n is a, c, g, or t
  misc_feature (7921)..(7921): n is a, c, g, or t
gaggatgcagagtgggagaccttaaaaccgtctgatctggctgctaaagcgagtgtctgacgaccacccattaacaccagcgagtagcgtttgctcacggctttaggataagaagcctggaatggtcccccctccgccgggagaagaaagccagacggtcatccttccacctggctggcagagctacctgtcgcctcagggccggcggtactatgtcaacacgaccaccaatgagaccacctgggaacgtcccagcagttctcctgggattccagccagccctggctctcacaggagctctctgcctccaacagtgaatggataccacgcatcagggaccccagcgcaccctccagagactgcccacatgagtgtccgaaaatccaccggtgattcccagaacctgggatcctcatcgccaagcaaaaagcagagcaaggaaaacaccatcacaataaactgtgtgacgttccctcacccagacacgatgccggaacagcagctgctgaaaccaaccgagtggagctactgcgactacttctgggctgataagaaggacccccaaggcaacggcacggtggctgggtttgaactactgctccagaaacagctgaagggcaaacaaatgcagaaggaaatgtcagaattcatccgggaaaggataaagattgaagaagactatgcgaagaacttagctaagctctctcagaactccttggcttcacaggaggaaggctccttgggagaggcgtgggcccaggtgaagaagagcctggcggacgaagcagaagttcacctcaagttctctgccaagcttcacagcgaggtggagaagcccctgatgaacttccgtgagaacttcaagaaagacatgaagaagtgcgaccaccacattgccgaccttcgcaagcagctcgccagccgctatgcctcggtggagaaggcccggaaagccctcacagagcggcagagagacctggagatgaagacccagcagctggagatcaagctgagcaacaagacagaggaggacatcaagaaggcgcgganaaagtccacacaggctggagacgacctcatgcgctgtgtggatctctacaaccaggcccagtccaaatggtttgaagagatggtgaccaccacattggagctagagcggctggaggtggagagggtagagatgatccggcagcacctgtgccagtacacgcagctgcggcatgaaacagacatgttcaaccaaagcacagtcgagcccgtggatcagctgcttcgaaaagtggacccggccaaagacagggagctgtgggtcagagagcacaagacgggcaacatccgccctgtggacatggagatctagatgggcctgtgcagcttcggggggtcctgctggggaggggggctgggctcccaccatggggcccatgccgagtggatgccccccaccctctctcctgggccactgaggagaggggagagagctggtgattccagaagggtgacccggacagcctagctgggggctcccccatattcccaggcccagaagacagacccacagccctgcccttgtctctgaggctgaagaccccctgactcccatgctgtgcttgccgctctgaaacaaacagaggctggaactttgtggtccttgccgagttttgtaggggtcactgtcacatgcttgtgccctggaagccccaaggctcttcctccagctggctcccttgtctccagggctttggaggatcagggtagggagggctctgtctctaagccaggtgtcaggatcagaatcatgggtagaaggtgccattcagctcacagccgcacccagaatcctttgcagccctccttctttatttttttcccattgcattctgggagtccacatctggctttctcagccactgttcatcaccaggggttttaggaggaaggcttggctcctgtcttcccagacccaccatgcctggagaggtcaggatggaactacctcattcggcaaattagccccaaattgagcgctgaatcgtgtcccatgagatcaggcgccatctgtaaagtctcctctggaaatgccaatccatccttcccccagctgcttcctcggggaggcccctgcccccaccctgccagcccttcccagtctcattagaggaagctttccaaagttctcagttatcaagacctcatccagctcgtccaaaggcttcagggatggaaacaaaccagctcgtctcanaggccagcaagctggggcctgtccgccacggtgccctgtgcacctttgggctgccctggcccccactctcccgggccgcccaccacaggctcttaatggggccgggtcagtcctacatgtgagatgggttagggcaagtctttgccatcccccagatggctctgtcttcttgtgtatggcagggctgggactgctgtcccttgtacagttttctgtcactggtgggcactggacaggcatagcagactctcttgtggccacactaggttgtcgcctttcaggcagtgtcccgccacctttgcttcccgctccttctggacattccagagccctgcaccaaacccttacttggtgtctgcacctcctttccctctctccatcttccaatccctggaaaagtctggtctgagtgtgacttgggaagctttcagtgctgctgtttggcccagctcattactttctccctttctctaccacagcaaacacattctccaccatgtcagtctaaagagtctaaaggggccgggagaagcntgagcgaggggcagattctagtcgggagcccatgccctggaaatccatctttcttcatctttcccattgaccactttgggtttgacctgcacatctgcagtgagggcagaattcaacaagcacaactcactggtctttcagtcaacgtgctagaanccgatgacttattaatctctaattttttggcgcctctttcattgaatgagaattgctttcgtatagttcacattagaaaaatgcctaatatactaaagtaaaccaaannnnnnnantttnctcttgttcttgaaacattgcaaccaaaaaggtcagcacaaaggccttcacctacgtgaagacctcctggtaggatctgtccatgggatggagaaccactctgtccagatctggggttgggtcatgacaccagctaccaatttnagaatattatttcttggtttctttatgaaaaatgggtgctagtggtaattgctttgtggcttagtaaactactctgtggatgatttccaaacattcaaagccaatagccttgttattaacaagatattttgagtacaatatggctcattgacttttccattacatctgaggattccagagtcctctgttcatccctgggatagagtgagccctcttgcgtcttccagggtagctcaggttggcccagtttgggccagtccatttttggaggtcactctttcccccctcatcccctcacctccttctctttacccccttcacgtacttcctttctttcttccctctgttattcattcatcaagcaggttaaagccattgtgctaagatctaatctgaggacactataatggccctgtcgtcagggaagcccgtgatcgctcgttttcaggggtcttaccggtcagcaaccttggcattgatacataggcactctacagaatttaagttttcagaggnaagtctgttgttctgattaatctgcattcattcagcgaatgctcaagacaagccaggcatgctgagaagcggcgctctagttgtatgtaagatgggcattcctctgctctcctctattctccatgtcgactgagaagagtataataagaacattgtaccctctccacacttaaccctctgggattctttattataatataaaccaccgtcgtgaggcatttacctgttggatggaaggtagacagcaacaagattttaatcacctggtcaccagaccctcacggcccatatccaattcgaatttcagaaatttctntgtttgctttaaataactctttacaaataagggtcgggcacggtggctcacgcctgtaatcccagctctttgggaggccgaggtgggcagatcacgaggtcaggagatcgagaccatcctggctaacatggtgaaaccccgtctctgctaaaaatacaaaaaattagccagatgtggtggtgcacacctgtagtcccaactattcggcaggctgaggcagtagaatcgcttgaacctgggaggcggagattgcagtgaaccaagatcgggccactgcactccagcttgggtgacagagcaagactccatctcaaaaaaattataaataactctttgcaaataggaaagtgaagctcaagggtaaccagtgaggctatgaaattgccagtgaattaagaccagggctagagtcaacagtccagaacccctatccgtatgaacaggggcccgtttctggttgaaatcaaggttaggatgcaactgagaaaataaaagactgcactttggagaggcaagcacgctatccgggttgttgttttgttttatgtcttggtgcttaggtgaggacttagctgggtttattcaaagtgggcgggtctgggctattcttgagaatgtcccttccatttctgagaacaagtcagccccttctacctgcctccacccaggagactgatgcacaagatctgtttgtgaaagcctgatttaaaaagaaaaaaaaaattccttaagccaaatggtgttccaagttggttgctgtgacaacctccaggaagagccacttgttaccctctattctttctagtgctttcagtcagtggcaacacataggccccttggaccgtggggatggcggccctgagattctgtcagtgggaccaccctgggcctcctttctacctccactcagcaccctgttggccaaggagaatttctgcggtgggaggcagtgctctgctagtcaggattgataaacagctgggcacaccgaaacagtgtaccaacgaattcaccaaccaggggtttctttccctaccctttgtgaaaaccaatcaattactagatgagtggatggatgcagaaaaatctgggctgagccaaagtcccttttggaaatacaagccataacattcgaaggacatcagcgaccttggcttgtttaggtgattttacttccagctgcaggtagtcttgacaaggagngtttaaacagaaggctcaagatgcattccttgtgtaggtnggagagagcacttctaatgttaagtggggtacagatcagctgcccccccacgtagcctggacatcgtcttatccccataatccttgccatccctacaaggcccatcgccaccaccttttcccaggtttattgaggtatgattgacatccagtaaaattcaccctttggaaatatacagntctgtgaattnnganananttagtgtcttgtgaccatcaccaagatcaacctgtttttaaccctccaaaaaattcccttctcctgccctctttccctggcaaccctgattgattatctgatcctataattttgccttttctagaatgtcatataaatggagtcacactgatgtcgccttttgagtctggcatctttccctcagcttaatgcttttgagtcattcatgatgtgtgcgtgtggtttgttccttctccttgccgggaagtatttcattgcatgggcgtactactctgcttctttatttttacactgagcctttcgccctggaagttcttggcccagggtcttcaacttgtttgcacgaccacttccagcttgctgcttccttcagttccccaggctcctcctccaaatgccagctgtgcccacaagctgttcttagggctcacactcgccttttggcgcgtggtgggtttttggtagtgcagaaagaatccagggatgggaggggaagggacggatgggtgctcaattgctgctcacgtctgctgcaacctgnaagcttgcatctcagccagcagatctgctcccttctgggacccaggcttcagtgtcacacggtccttggctatgtattgggcgttggaggctttgaaaggcgagcagaagcagcatggacaagaaggctggggctggccctggggctcatcatgatgctttcctggatctgttgcttcatctgcaagctgagggtgtttgttctagatgagtgtctcaggccaccggcaactgcatgtacctcctccctttctcatttccaatgatgtaccctgtacacgtgttcatgctgtgtctggctctcatctgcacaatcgtgcatagaattgcctcaagtcctggtgagagagatgccgtggtacttttccatttagattcaaatggagctaaaattaagagttttatgagctgttaagaatgaggtagtttctcctaggaccccccaaagacagtgcaagtaatgaccgtttggntctcattcgtcgatctttgatagtatgttctggagtctactccccaggagccaggacaggcgtgaagatggagtccttgtcgcagctggagccttgcctagctggtgatcacacagcctggcctgtacctgcaccccactggatggtggtacatggtggcagggacaggaccacacccagttaaggccagaccaggctgagtgtgacccctgaggtaaacactccactaagctgtgtcttgttcatgccccctgctcagtgaaaggtgagtcccgagaccagttgggtacctctctatgcgaaccagagacatttctggatccaggccaggtgaagattagggccaggaagcctgagcccccggggcctcaaggtagggagccgaagaggctgccaggactctgctgggttgaaatttgccggggaggactcttgtctccccctcaggagtatttttgttgaggctttcctggnaggtgaagaagcaattcccattgcagcaggttagagcgagaatcagacagagggcaaaaaccaattcgcttctccccacgttctaaatgctggggcatggctgtcaggagggcttcctgggaggtgtctctgggggtggggtgaggttggggcgatggcctttggagattgcgtgtggtgttcaggactgttccttggtgtttgagggaaactttagtgggattgcagtggaatgtaaggtcagggcacgtgggtgctctctcggggtggggtgactgggagacctagagggaaagcctgctatgcagggggagagcacaggactggccctgctctgcggcctcctttgtcccataacctgaagttaagtcacatcccctgtcgggacctccgtgcactcatctgtcaagtgggggcgcttcccttccagcatcacctgcagcagacgggctctcgggagtcgtgggttccaggcagctgtgtggacccagggacagacattcaaagggacgccagccatccttngtgacaggggccccaacttagcatcccttcccttccgttaggaaggagatgaccggaagcaaccccttcacagacacgagcacatcggcaaaccctatgaaagtggaattttctaacaaaataaacttgcttgtttgatctgttttctgtaacttttgctaaatactttatacatttttcatgttaaagagccgtgtctcccgccagcactcctcaccccggtatgaatgtgtttcctccacattgtatatccttccaccctctggctgcctagatcagtaaataaaattgatgtaatataatttataagtaacactgttgaaaccctgatcccagtggaggctgtaacccacctgcccccgcaccacccccctgacccctgttaccgcatttgtgtgtattaatgctgaagaattaaatgtttaaagagtttaaantttgaaggcgtttgctatatacagttgtcctgcattattataaagagttttcaggaagttaaaaaaaaaaaaaaaaaaaaaaaaaaaaaaaaa

SEQ ID NO: 67 - DNA, 3016 bp, Homo sapiens
  misc_feature: fatty acid desaturase 2(Homo sapiens)
ttagactggcagcatggggaagggagggaaccagggcgagggggccgccgagcgcgaggtgtcggtgcccaccttcagctgggaggagattcagaagcataacctgcgcaccgacaggtggctggtcattgaccgcaaggtttacaacatcaccaaatggtccatccagcacccggggggccagcgggtcatcgggcactacgctggagaagatgcaacggatgccttccgcgccttccaccctgacctggaattcgtgggcaagttcttgaaacccctgctgattggtgaactggccccggaggagcccagccaggaccacggcaagaactcaaagatcactgaggacttccgggccctgaggaagacggctgaggacatgaacctgttcaagaccaaccacgtgttcttcctcctcctcctggcccacatcatcgccctggagagcattgcatggttcactgtcttttactttggcaatggctggattcctaccctcatcacggcctttgtccttgctacctctcaggcccaagctggatggctgcaacatgattatggccacctgtctgtctacagaaaacccaagtggaaccaccttgtccacaaattcgtcattggccacttaaagggtgcctctgccaactggtggaatcatcgccacttccagcaccacgccaagcctaacatcttccacaaggatcccgatgtgaacatgctgcacgtgtttgttctgggcgaatggcagcccatcgagtacggcaagaagaagctgaaatacctgccctacaatcaccagcacgaatacttcttcctgattgggccgccgctgctcatccccatgtatttccagtaccagattatcatgaccatgatcgtccataagaactgggtggacctggcctgggccgtcagctactacatccggttcttcatcacctacatccctttctacggcatcctgggagccctccttttcctcaacttcatcaggttcctggagagccactggtttgtgtgggtcacacagatgaatcacatcgtcatggagattgaccaggaggcctaccgtgactggttcagtagccagctgacagccacctgcaacgtggagcagtccttcttcaacgactggttcagtggacaccttaacttccagattgagcaccacctcttccccaccatgccccggcacaacttacacaagatcgccccgctggtgaagtctctatgtgccaagcatggcattgaataccaggagaagccgctactgagggccctgctggacatcatcaggtccctgaagaagtctgggaagctgtggctggacgcctaccttcacaaatgaagccacagcccccgggacactgtggggaaggggtgcaggtggggtgatggccagaggaatgatgggcttttgttctgaggggtgtccgagaggctggtgtatgcactgctcacggaccccatgttggatctttctccctttctcctctcctttttctcttcacatctcccccatagcaccctgccctcatgggacctgccctccctcagccgtcagccatcagccatggccctcccagtgcctcctagccccttcttccaaggagcagagaggtggccaccgggggtggctctgtcctacctccactctctgcccctaaagatgggaggagaccagcggtccatgggtctggcctgtgagtctccccttgcagcctggtcactaggcatcacccccgctttggttcttcagatgctcttggggttcataggggcaggtcctagtcgggcagggcccctgaccctcccggcctggcttcactctccctgacggctgccattggtccaccctttcatagagaggcctgctttgttacaaagctcgggtctccctcctgcagctcggttaagtacccgaggcctctcttaagatgtccagggccccaggcccgcgggcacagccagcccaaaccttgggccctggaagagtcctccaccccatcactagagtgctctgaccctgggctttcacgggccccattccaccgcctccccaacttgagcctgtgaccttgggaccaaagggggagtccctcgtctcttgtgactcagcagaggcagtggccacgttcagggaggggccggctggcctggaggctcagcccaccctccagcttttcctcagggtgtcctgaggtccaagattctggagcaatctgacccttctccaaaggctctgttatcagctgggcagtgccagccaatccctggccatttggccccaggggacgtgggccctgcaggctgcaggagggcactggagctgggaggtctcgtcccagccctccccatctcggggctgctgtgtggacggcgctgcctcaggcactctcctgtctgaacctgcccttactgtgtttaacctgttgctccaggatgcattctgataggagggggcggcagggctgggccttgtgacaatctgcctttcaccacatggccttgcctcggtggccctgactgtcagggagggccagggaggcagagcgggagggagtctcaggaggaggcttgccctgaggggctggggagggggtacctcatgaggaccagggtggagcttgagaagaggaggaggtgggggcttggaggtgcttggtagctgaggggacgggcaagtgagaggggagggagggaagtcctgggaggatcctgagctgctgttgcagtctaacccactaatcagttcttagattcaggggaagggcaggcaccaacaactcagaatgggggctttcggggagggcgcctagtccccccagctctaagcagccaggagggacctgcatctaagcatctgggttgccatggcaatggcatgccccccagctactgtatgcccccgacccccgcagaggcagaatgaacccatagggagctgatcgtaatgtttatcatgttacttccccacccctacattttttgaaataaaataaggaattttaaaaaa

SEQ ID NO: 68 - DNA, 2123 bp, Homo sapiens
  misc_feature: Homo sapiens polo-like kinase 1 (Drosophila) (Homo sapiens)
gggaggagcggagcggtgcggaggctctgctcggatcgaggtctgcagcgcagcttcgggagcatgagtgctgcagtgactgcagggaagctggcacgggcaccggccgaccctgggaaagccggggtccccggagttgcagctcccggagctccggcggcggctccaccggcgaaagagatcccggaggtcctagtggacccacgcagccggcggcgctatgtgcggggccgctttttgggcaagggcggctttgccaagtgcttcgagatctcggacgcggacaccaaggaggtgttcgcgggcaagattgtgcctaagtctctgctgctcaagccgcaccagagggagaagatgtccatggaaatatccattcaccgcagcctcgcccaccagcacgtcgtaggattccacggctttttcgaggacaacgacttcgtgttcgtggtgttggagctctgccgccggaggtctctcctggagccgcacaagaggaggaaagccctgactgagcctgaggcccgatactacctacggcaaattgtgcttggctgccagtacctgcaccgaaaccgagttattcatcgagacctcaagctgggcaaccttttcctgaatgaagatctggaggtgaaaataggggattttggactggcaaccaaagtcgaatatgacggggagaggaagaagaccctgtgtgggactcctaattacatagctcccgaggtgctgagcaagaaagagcacagtttcgaggtggatgtgtggtccattgggtgtatcatgtataccttgttagtgggcaaaccaccttttgagacttcttgcctaaaagagacctacctccggatcaagaagaatgaatacagtattcccaagcacatcaaccccgtggccgcctccctcatccagaagatgcttcagacagatcccactgcccgcccaaccattaacgagctgcttaatgacgagttctttacttctggctatatccctgcccgtctccccatcacctgcctgaccattccaccaaggttttcgattgctcccagcagcctggaccccagcaaccggaagcccctcacagtcctcaataaaggcttggagaaccccctgcctgagcgtccccgggaaaaagaagaaccagtggttcgagagacaggtgaggtggtcgactgccacctcagtgacatgctgcagcagctgcacagtgtcaatgcctccaagccctcggagcgtgggctggtcaggcaagaggaggctgaggatcctgcctgcatccccatcttctgggtcagcaagtgggtggactattcggacaagtacggccttgggtatcagctctgtgataacagcgtgggggtgctcttcaatgactcaacacgcctcatcctctacaatgatggtgacagcctgcagtacatagagcgtgacggcactgagtcctacctcaccgtgagttcccatcccaactccttgatgaagaagatcaccctccttaaatatttccgcaattacatgagcgagcacttgctgaaggcaggtgccaacatcacgccgcgcgaaggtgatgagctcgcccggctgccctacctacggacctggttccgcacccgcagcgccatcatcctgcacctcagcaacggcagcgtgcagatcaacttcttccaggatcacaccaagctcatcttgtgcccactgatggcagccgtgacctacatcgacgagaagcgggacttccgcacataccgcctgagtctcctggaggagtacggctgctgcaaggagctggccagccggctccgctacgcccgcactatggtggacaagctgctgagctcacgctcggccagcaaccgtctcaaggcctcctaatagctgccctcccctccggactggtgccctcctcactcccacctgcatctggggcccatactggttggctcccgcggtgccatgtctgcagtgtgccccccagccccggtggctgggcagagctgcatcatccttgcaggtgggggttgctgtataagttatttttgtacatgttcgggtgtgggttctacagacttgtccccctccccctcaaccccaccatatgaattgtacagaatatttctatt

SEQ ID NO: 69 - DNA, 3317 bp, Homo sapiens
  misc_feature: tribbles homolog 1 (Drosophila) (Homo sapiens)
ccccagcgaggctccgggagcccttgcctgcgggggtccggggactcgagccggcctccgccccccggacgcacagccagcgtggtccccgcgtgcaacgcgagcgccggggagtggctcctgctttgcccctcgtgggggccgagccaagaccagtctgcaaactccatcccgccggctggaagaagtcgcggagccggcaccaaacccgcagcgtcttcccgcgcggatcccgggacttaaaaagccggggccaccccggcccaggacgggatgcgggtcggtccggtgcgctctgccatgagcggcgcctcgcagccccgcggcccggccctgctcttcccagccacccgaggcgtcccggccaaacgcctgctggacgccgacgacgcggcggctgtggcggccaagtgcccgcgcctctccgagtgctccagccccccggactacctcagcccccccggctcgccctgcagcccgcagcccccgcctgccgctccgggggccggcggaggctccgggagcgcgccggggcccagccgcatcgccgactacctgctgctgcccctagccgagcgcgagcatgtgtcccgggcgctgtgcatccacactggacgcgagctgcgctgcaaggtgtttcccattaaacactaccaggacaaaatcaggccttacatccagctgccatcgcacagcaacattactggcattgtggaagtgatccttggggaaaccaaggcctatgtcttctttgagaaggactttggggacatgcactcctatgtgcgaagccggaagaggctgcgggaagaggaagccgcccggctcttcaagcagattgtctccgccgtcgcccactgccaccagtcagccatcgtgctgggggacctgaagcttaggaagttcgtcttctccacggaggagagaacccagcttagactagaaagtctagaagacacacacataatgaagggggaagatgatgctttgtcagacaaacatggctgcccagcctacgtgagccctgagatcctcaacaccactgggacctactccggaaaggctgcggacgtttggagcctgggggtgatgctctacacccttctggttggacgataccccttccatgactcagaccccagtgcccttttctccaaaattcggcgtggacagttctgcattcctgagcacatttcccccaaagccaggtgcctcattcgcagcctcttgagacgggagccctccgagagactcactgcccccgagatcctactgcacccctggtttgagtccgtcttggaacccgggtacatcgactcagaaataggaacttcagaccagattgttccagagtaccaggaggacagtgacattagttccttcttctgctaatccccaaaacctcagaaacctcataattcttaacacctggcatttccatttctaaagatggacaggccctttggcatggtaccaaccagataatgactgcatcaggatgaaagctgctgaactcggcatggcgcctcctcttctctgttgggatgagtgactttattgatttgagcagcatatgctgtgattggctgccctgcaaatttgtttcccttaaggaaccctcaccaactatctctgctggatttgggagttccgcatcttttgtggagggcagagtatggacatcttacacccggtggtcaagtgtgtaataaacttgagcattcgaatgggagaaaaagcaaatcgcacaatgacatattttgagtaataaccgtatttttcacagggtgacaaattgggccaataaatctgccatctttgaactcatctttggtggctagactgctacggcagcttctctgatgggaaagttccttttttggcttaacactcaccctttcttcacactcacatttaccaatgactctgctccgtttttggagcagactgttttaagttgctcaggagcctgatggaaccatgaaccgagactcttctctgtttcctgccaagacctcatctgcactaatgccttctccctgaccttgacacttccccctttagctataaaagcacttaccagccgaacgtggaacagtatcacaaaagattccatctcccaacgatttcagaactctgagctcagagagactccagattttaaaaaataatttgagtgcttggaaactattagctttttaagttccttccaaatatgttagtacctaccctttactttttccccaagaccatctcagggtggagcattctgtctaagagaagaaagataaggaggctcccacccacctctcccaagagcagacattaaacatctttgtgctttgaagagagtgaattttggatagtcttgtgattctcagactaacttccagaattatactttaacccctcccagatatggtccgcctttggcattgtgtgtacatctgcagttttgcatggtgggttgttaatatttcaaatgtgtggtttatgaatacgtctgtataatcggcttctggagtgaaacagcaaaccccaaatcttcaaagttggaaggaactttaaaaatcatccggtccaatctctttcctctttctgccacctcccaaggcagaaatcccctcttcagcttcttttgtaggtgggaatccagcctctgttagatatgtccagagatggaaactcactcccctacaaaagatggagcttaatggagaaattgcaactttcattaaaaaacaaattcagatgaaatatcagtaactgtcttggacagtgctgaaatcaggtggttaaacgggtaaacaaaatatactgtattttgagaaatggcacaaaaacaggcagtcatctttaagggctatgcctaggcaaactactaacatgcattgtgagaatgccgtgtatacctcacgtactgtgtactttgtacatatattttaccttttatacctatgttcgattttgttttgttttgttctggctttgaggcttgttttgttgtctgtgtctgtctgaataacctgcgtgtctaaaaccacgtgaaatgtgaatgattattggcaatattaccttgacagaatcatgggactttgagaagagggaggacagaggcctctgtcgcactaacgctctcgtggttgctcgactgttgtatctgtgatacattatccgactaaggactctgggctggcagggccttctgccgggaaagctagaaacactaggttcttcctgtacatacgtgtatatatgtgaacagtgagatggccgtttctgacttgtagagaaattttaataaacctggtttcgta

SEQ ID NO: 70 - DNA, 1421 bp, Homo sapiens
  misc_feature: thymidine kinase 1, soluble (Homo sapiens)
acttactgcgggacggccttggagagtactcgggttcgtgaacttcccggaggcgcaatgagctgcattaacctgcccactgtgctgcccggctcccccagcaagacccgggggcagatccaggtgattctcgggccgatgttctcaggaaaaagcacagagttgatgagacgcgtccgtcgcttccagattgctcagtacaagtgcctggtgatcaagtatgccaaagacactcgctacagcagcagcttctgcacacatgaccggaacaccatggaggcgctgcccgcctgcctgctccgagacgtggcccaggaggccctgggcgtggctgtcataggcatcgacgaggggcagtttttccctgacatcatggagttctgcgaggccatggccaacgccgggaagaccgtaattgtggctgcactggatgggaccttccagaggaagccatttggggccatcctgaacctggtgccgctggccgagagcgtggtgaagctgacggcggtgtgcatggagtgcttccgggaagccgcctataccaagaggctcggcacagagaaggaggtcgaggtgattgggggagcagacaagtaccactccgtgtgtcggctctgctacttcaagaaggcctcaggccagcctgccgggccggacaacaaagagaactgcccagtgccaggaaagccaggggaagccgtggctgccaggaagctctttgccccacagcagattctgcaatgcagccctgccaactgagggacctgcaagggccgcccgctcccttcctgccactgccgcctactggacgctgccctgcatgctgcccagccactccaggaggaagtcgggaggcgtggagggtgaccacaccttggccttctgggaactctcctttgtgtggctgccccacctgccgcatgctccctcctctcctacccactggtctgcttaaagcttccctctcagctgctgggacgatcgcccaggctggagctggccccgcttggtggcctgggatctggcacactccctctccttggggtgagggacagagccccacgctgttgacatcagcctgcttcttcccctctgcggctttcactgctgagtttctgttctccctgggaagcctgtgccagcacctttgagccttggcccacactgaggcttaggcctctctgcctgggatgggctcccaccctcccctgaggatggcctggattcacgccctcttgtttccttttgggctcaaagcccttcctacctctggtgatggtttccacaggaacaacagcatctttcaccaagatgggtggcaccaaccttgctgggacttggatcccaggggcttatctcttcaagtgtggagagggcagggtccacgcctctgctgtagcttatgaaattaactaatt

SEQ ID NO: 71 - DNA, 1345 bp, Homo sapiens
  misc_feature: regulator of G-protein signalling 2 (Homo sapiens)
aaaacagccggggctccagcgggagaacgataatgcaaagtgctatgttcttggctgttcaacacgactgcagacccatggacaagagcgcaggcagtggccacaagagcgaggagaagcgagaaaagatgaaacggacccttttaaaagattggaagacccgtttgagctacttcttacaaaattcctctactcctgggaagcccaaaaccggcaaaaaaagcaaacagcaagctttcatcaagccttctcctgaggaagcacagctgtggtcagaagcatttgacgagctgctagccagcaaatatggtcttgctgcattcagggcttttttaaagtcggaattctgtgaagaaaatattgaattctggctggcctgtgaagacttcaaaaaaaccaaatcaccccaaaagctgtcctcaaaagcaaggaaaatatatactgacttcatagaaaaggaagctccaaaagagataaacatagattttcaaaccaaaactctgattgcccagaatatacaagaagctacaagtggctgctttacaactgcccagaaaagggtatacagcttgatggagaacaactcttatcctcgtttcttggagtcagaattctaccaggacttgtgtaaaaagccacaaatcaccacagagcctcatgctacatgaaatgtaaaagggagcccagaaatggaggacatttcattctttttcctgaggggaaggactgtgacctgccataaagactgaccttgaattcagcctgggtgttcaggaaacatcactcagaactattgattcaaagttgggtagtgaatcaggaagccagtaactgactaggagaagctggtatcagaacagcttccctcactgtgtacagaacgcaagaagggaataggtggtctgaacgtggtgtctcactctgaaaagcaggaatgtaagatgatgaaagagacaatgtaatactgttggtccaaaagcatttaaaatcaatagatctgggattatgtggccttaggtagctggttgtacatctttccctaaatcgatccatgttaccacatagtagttttagtttaggattcagtaacagtgaagtgtttactatgtgcaagggtattgaagttcttatgaccacagatcatcagtactgttgtctcatgtaatgctaaaactgaaatggtccgtgtttgcattgttaaaaatgatgtgtgaaatagaatgagtgctatggtgttgaaaactgcagtgtccgttatgagtgccaaaaatctgtcttgaaggcagctacactttgaagtggtctttgaatacttttaataaatttattttgataaataatattg

SEQ ID NO: 72 - DNA, 5128 bp, Homo sapiens
  misc_feature: cytochrome P450, family 1, subfamily B, polypeptide 1 (Homo sapiens)
actctggagtgggagtgggagcgagcgcttctgcgactccagttgtgagagccgcaagggcatgggaattgacgccactcaccgacccccagtctcaatctcaacgctgtgaggaaacctcgactttgccaggtccccaagggcagcggggctcggcgagcgaggcacccttctccgtccccatcccaatccaagcgctcctggcactgacgacgccaagagactcgagtgggagttaaagcttccagtgagggcagcaggtgtccaggccgggcctgcgggttcctgttgacgtcttgccctaggcaaaggtcccagttccttctcggagccggctgtcccgcgccactggaaaccgcacctccccgcagcatgggcaccagcctcagcccgaacgacccttggccgctaaacccgctgtccatccagcagaccacgctcctgctactcctgtcggtgctggccactgtgcatgtgggccagcggctgctgaggcaacggaggcggcagctccggtccgcgcccccgggcccgtttgcgtggccactgatcggaaacgcggcggcggtgggccaggcggctcacctctcgttcgctcgcctggcgcggcgctacggcgacgttttccagatccgcctgggcagctgccccatagtggtgctgaatggcgagcgcgccatccaccaggccctggtgcagcagggctcggccttcgccgaccggccggccttcgcctccttccgtgtggtgtccggcggccgcagcatggctttcggccactactcggagcactggaaggtgcagcggcgcgcagcccacagcatgatgcgcaacttcttcacgcgccagccgcgcagccgccaagtcctcgagggccacgtgctgagcgaggcgcgcgagctggtggcgctgctggtgcgcggcagcgcggacggcgccttcctcgacccgaggccgctgaccgtcgtggccgtggccaacgtcatgagtgccgtgtgtttcggctgccgctacagccacgacgaccccgagttccgtgagctgctcagccacaacgaagagttcgggcgcacggtgggcgcgggcagcctggtggacgtgatgccctggctgcagtacttccccaacccggtgcgcaccgttttccgcgaattcgagcagctcaaccgcaacttcagcaacttcatcctggacaagttcttgaggcactgcgaaagccttcggcccggggccgccccccgcgacatgatggacgcctttatcctctctgcggaaaagaaggcggccggggactcgcacggtggtggcgcgcggctggatttggagaacgtaccggccactatcactgacatcttcggcgccagccaggacaccctgtccaccgcgctgcagtggctgctcctcctcttcaccaggtatcctgatgtgcagactcgagtgcaggcagaattggatcaggtcgtggggagggaccgtctgccttgtatgggtgaccagcccaacctgccctatgtcctggccttcctttatgaagccatgcgcttctccagctttgtgcctgtcactattcctcatgccaccactgccaacacctctgtcttgggctaccacattcccaaggacactgtggtttttgtcaaccagtggtctgtgaatcatgacccagtgaagtggcctaacccggagaactttgatccagctcgattcttggacaaggatggcctcatcaacaaggacctgaccagcagagtgatgattttttcagtgggcaaaaggcggtgcattggcgaagaactttctaagatgcagctttttctcttcatctccatcctggctcaccagtgcgatttcagggccaacccaaatgagcctgcgaaaatgaatttcagttatggtctaaccattaaacccaagtcatttaaagtcaatgtcactctcagagagtccatggagctccttgatagtgctgtccaaaatttacaagccaaggaaacttgccaataagaagcaagaggcaagctgaaattttagaaatattcacatcttcggagatgaggagtaaaattcagtttttttccagttcctcttttgtgctgcttctcaattagcgtttaaggtgagcataaatcaactgtccatcaggtgaggtgtgctccatacccagcggttcttcatgagtagtgggctatgcaggagcttctgggagatttttttgagtcaaagacttaaagggcccaatgaattattatatacatactgcatcttggttatttctgaaggtagcattctttggagttaaaatgcacatatagacacatacacccaaacacttacaccaaactactgaatgaagaagtattttggtaaccaggccatttttggtgggaatccaagattggtctcccatatgcagaaatagacaaaaagtatattaaacaaagtttcagagtatattgttgaagagacagagacaagtaatttcagtgtaaagtgtgtgattgaaggtgataagggaaaagataaagaccagaaattcccttttcaccttttcaggaaaataacttagactctagtatttatgggtggatttatccttttgccttctggtatacttccttacttttaaggataaatcataaagtcagttgctcaaaaagaaatcaatagttgaattagtgagtatagtggggttccatgagttatcatgaattttaaagtatgcattattaaattgtaaaactccaaggtgatgttgtacctcttttgcttgccaaagtacagaatttgaattatcagcaaagaaaaaaaaaaaagccagccaagctttaaattatgtgaccataatgtactgatttcagtaagtctcataggttaaaaaaaaaagtcaccaaatagtgtgaaatatattacttaactgtccgtaagcagtatattagtattatcttgttcaggaaaaggttgaataatatatgccttgtgtaatattgaaaattgaaaagtacaactaacgcaaccaagtgtgctaaaaatgagcttgattaaatcaaccacctatttttgacatggaaatgaagcagggtttcttttcttcactcaaattttggcgaatctcaaaattagatcctaagatgtgttcttatttttataacatctttattgaaattctatttataatacagaatcttgttttgaaaataacctaattaatatattaaaattccaaattcatggcatgcttaaattttaactaaattttaaagccattctgattattgagttccagttgaagttagtggaaatctgaacattctcctgtggaaggcagagaaatctaagctgtgtctgcccaatgaataatggaaaatgccatgaattacctggatgttctttttacgaggtgacaagagttggggacagaactcccattacaactgaccaagtttctcttctagatgattttttgaaagttaacattaatgcctgctttttggaaagtcagaatcagaagatagtcttggaagctgtttggaaaagacagtggagatgaggtcagttgtgttttttaagatggcaattactttggtagctgggaaagcataaagctcaaatgaaatgtatgcattcacatttagaaaagtgaattgaagtttcaagttttaaagttcattgcaattaaacttccaaagaaagttctacagtgtcctaagtgctaagtgcttattacattttattaagctttttggaatctttgtaccaaaattttaaaaaagggagtttttgatagttgtgtgtatgtgtgtgtggggtggggggatggtaagagaaaagagagaaacactgaaaagaaggaaagatggttaaacattttcccactcattctgaattaattaatttggagcacaaaattcaaagcatggacatttagaagaaagatgtttggcgtagcagagttaaatctcaaataggctattaaaaaagtctacaacatagcagatctgttttgtggtttggaatattaaaaaacttcatgtaattttattttaaaatttcatagctgtacttcttgaatataaaaaatcatgccagtatttttaaaggcattagagtcaactacacaaagcaggcttgcccagtacatttaaattttttggcacttgccattccaaaatattatgccccaccaaggctgagacagtgaatttgggctgctgtagcctatttttttagattgagaaatgtgtagctgcaaaaataatcatgaaccaatctggatgcctcattatgtcaaccaggtccagatgtgctataatctgtttttacgtatgtaggcccagtcgtcatcagatgcttgcggcaaaagaaagctgtgtttatatggaagaaagtaaggtgcttggagtttacctggcttatttaatatgcttataacctagttaaagaaaggaaaagaaaacaaaaaacgaatgaaaataactgaatttggaggctggagtaatcagattactgctttaatcagaaaccctcattgtgtttctaccggagagagaatgtatttgctgacaaccattaaagtcagaagttttactccaggttattgcaataaagtataatgtttattaaatgcttcatttgtatgtcaaagctttgactctataagcaaattgcttttttccaaaacaaaaagatgtctcaggtttgttttgtgaattttctaaaagctttcatgtcccagaacttagcctttacctgtgaagtgttactacagccttaatattttcctagtagatctatattagatcaaatagttgcatagcagtatatgttaatttgtgtgtttttagctgtgacacaactgtgtgattaaaaggtatactttagtagacatttataactcaaggataccttcttatttaatcttttcttatttttgtactttatcatgaatgcttttagtgtgtgcataatagctacagtgcatagttgtagacaaagtacattctggggaaacaacatttatatgtagcctttactgtttgatataccaaattaaaaaaaaattgtatctcattacttatactgggacaccattaccaaaataataaaaatcactttcataatcttgaaaaaa

SEQ ID NO: 73 - DNA, 1536 bp, Homo sapiens
  misc_feature: thymidylate synthetase (Homo sapiens)
ggggggggggggaccacttggcctgcctccgtcccgccgcgccacttggcctgcctccgtcccgccgcgccacttcgcctgcctccgtcccccgcccgccgcgccatgcctgtggccggctcggagctgccgcgccggcccttgccccccgccgcacaggagcgggacgccgagccgcgtccgccgcacggggagctgcagtacctggggcagatccaacacatcctccgctgcggcgtcaggaaggacgaccgcacgggcaccggcaccctgtcggtattcggcatgcaggcgcgctacagcctgagagatgaattccctctgctgacaaccaaacgtgtgttctggaagggtgttttggaggagttgctgtggtttatcaagggatccacaaatgctaaagagctgtcttccaagggagtgaaaatctgggatgccaatggatcccgagactttttggacagcctgggattctccaccagagaagaaggggacttgggcccagtttatggcttccagtggaggcattttggggcagaatacagagatatggaatcagattattcaggacagggagttgaccaactgcaaagagtgattgacaccatcaaaaccaaccctgacgacagaagaatcatcatgtgcgcttggaatccaagagatcttcctctgatggcgctgcctccatgccatgccctctgccagttctatgtggtgaacagtgagctgtcctgccagctgtaccagagatcgggagacatgggcctcggtgtgcctttcaacatcgccagctacgccctgctcacgtacatgattgcgcacatcacgggcctgaagccaggtgactttatacacactttgggagatgcacatatttacctgaatcacatcgagccactgaaaattcagcttcagcgagaacccagacctttcccaaagctcaggattcttcgaaaagttgagaaaattgatgacttcaaagctgaagactttcagattgaagggtacaatccgcatccaactattaaaatggaaatggctgtttagggtgctttcaaaggagcttgaaggatattgtcagtctttaggggttgggctggatgccgaggtaaaagttctttttgctctaaaagaaaaaggaactaggtcaaaaatctgtccgtgacctatcagttattaatttttaaggatgttgccactggcaaatgtaactgtgccagttctttccataataaaaggctttgagttaactcactgagggtatctgacaatgctgaggttatgaacaaagtgaggagaatgaaatgtatgtgctcttagcaaaaacatgtatgtgcatttcaatcccacgtacttataaagaaggttggtgaatttcacaagctatttttggaatatttttagaatattttaagaatttcacaagctattccctcaaatctgagggagctgagtaacaccatcgatcatgatgtagagtgtggttatgaactttatagttgttttatatgttgctataataaagaagtgttctgc

SEQ ID NO: 74 - DNA, 7584 bp, Homo sapiens
  misc_feature: nuclear receptor interacting protein 1(Homo sapiens)
  misc_feature (313)..(313): n is a, c, g, or t
  misc_feature (824)..(824): n is a, c, g, or t
  misc_feature (1941)..(1941): n is a, c, g, or t
  misc_feature (4310)..(4310): n is a, c, g, or t
  misc_feature (4609)..(4609): n is a, c, g, or t
  misc_feature (4619)..(4619): n is a, c, g, or t
  misc_feature (4682)..(4682): n is a, c, g, or t
  misc_feature (4832)..(4832): n is a, c, g, or t
  misc_feature (5293)..(5293): n is a, c, g, or t
  misc_feature (5309)..(5309): n is a, c, g, or t
  misc_feature (5600)..(5600): n is a, c, g, or t
  misc_feature (5846)..(5847): n is a, c, g, or t
  misc_feature (6154)..(6154): n is a, c, g, or t
  misc_feature (6345)..(6345): n is a, c, g, or t
  misc_feature (6461)..(6461): n is a, c, g, or t
  misc_feature (6775)..(6782): n is a, c, g, or t
  misc_feature (7560)..(7564): n is a, c, g, or t
cgacccggcccacgcccgccgcacccgcgcgcgcccgtcgcccgtggcctcgcgtcgacgctgcgccgtgagcgccgctggtcggagggaagagctcgccggggcgccgggccaggacggggcggcaggcgccttcgcggaccgagcctgacggagccggaggctgggagccgcggcggcctggggaagtgtttggattgtgagctatttcagaactgttctcaggactcattattttaacatttgggagaaacacagccagaagaacactgatatttgcatttaatggggaacaaaagatgaagaaggaaanggaatatattcactaaggattctatctgcttactgctacagacctatgtgttaaggaattcttctcctcctccttgcgtagaagttgatcagcactgtggtcagactgcatttatcttgtcattgccagaagaaatcttggacagaatgtaacagtacgtctctctctgattgcgatggaaggtgataaactgatactcctttattaaagttacatcgcactcaccacagaaaaccattctttaaagtgaatagaaaccaagcccttgtgaacacttctattgaacatgactcatggagaagagcttggctctgatgtgcaccaggattctattgttttaacttacctagaaggattactaatgcatcaggcagcagggggatcaggtactgccgttgacaaaaagtctgctgggcataatgaagaggatcagaactttaacatttctggcagtgcatttcccacctgtcaaagtaatggtccagttctcaatacacatacatatcagggntctggcatgctgcacctcaaaaaagccagactgttgcagtcttctgaggactggaatgcagcaaagcggaagaggctgtctgattctatcatgaatttaaacgtaaagaaggaagctttgctagctggcatggttgacagtgtgcctaaaggcaaacaggatagcacattactggcctctttgcttcagtcattcagctctaggctgcagactgttgctctgtcacaacaaatcaggcagagcctcaaggagcaaggatatgccctcagtcatgattctttaaaagtggagaaggatttaaggtgctatggtgttgcatcaagtcacttaaaaactttgttgaagaaaagtaaagttaaagatcaaaagcctgatacgaatcttcctgatgtgactaaaaacctcatcagagataggtttgcagagtctcctcatcatgttggacaaagtggaacaaaggtcatgagtgaaccgttgtcatgtgctgcaagattacaggctgttgcaagcatggtggaaaaaagggctagtcctgccacctcacctaaacctagtgttgcttgtagccagttagcattacttctgtcaagcgaagcccatttgcagcagtattctcgagaacacgctttaaaaacgcaaaatgcaaatcaagcagcaagtgaaagacttgctgctatggccagattgcaagaaaatggccagaaggatgttggcagttaccagctcccaaaaggaatgtcaagccatcttaatggtcaggcaagaacatcatcaagcaaactgatggctagcaaaagtagtgctacagtgtttcaaaatccaatgggtatcattccttcttcccctaaaaatgcaggttataagaactcactggaaagaaacaatataaaacaagctgctaacaatagtttgcttttacatcttcttaaaagccagactatacctaagccaatgaatggacacagtcacagtgagagaggaagcatttttgaggaaagtagtacacctacaactattgatgaatattcagataacaatcctagttttacagatgacagcagtggtgatgaaagttcttattccaactgtgttcccatagacttgtcttgcaaacacngaactgaaaaatcagaatctgaccaacctgtttccctggataacttcactcaatccttgctaaacacttgggatccaaaagtcccagatgtagatatcaaagaagatcaagatacctcaaagaattctaagctaaactcacaccagaaagtaacacttcttcaattgctacttggccataagaatgaagaaaatgtagaaaaaaacaccagccctcagggagtacacaatgatgtgagcaagttcaatacacaaaattatgcaaggacttctgtgatagaaagccccagtacaaatcggactactccagtgagcactccacctttacttacatcaagcaaagcagggtctcccatcaatctctctcaacactctctggtcatcaaatggaattccccaccatatgtctgcagtactcagtctgaaaagctaacaaatactgcatctaaccactcaatggaccttacaaaaagcaaagacccaccaggagagaaaccagcccaaaatgaaggtgcacagaactctgcaacgtttagtgccagtaagctgttacaaaatttagcacaatgtggaatgcagtcatccatgtcagtggaagagcagagacccagcaaacagctgttaactggaaacacagataaaccgataggtatgattgatagattaaatagccctttgctctcaaataaaacaaatgcagttgaagaaaataaagcatttagtagtcaaccaacaggtcctgaaccagggctttctggttctgaaatagaaaatctgcttgaaagacgtactgtcctccagttgctcctggggaaccccaacaaagggaagagtgaaaaaaaaagagaaaactcccttaagagatgaaagtactcaggaacactcagagagagctttaagtgaacaaatactgatggtgaaaataaaatctgagccttgtgatgacttacaaattcctaacacaaatgtgcacttgagccatgatgctaagagtgccccattcttgggtatggctcctgctgtgcagagaagcgcacctgccttaccagtgtccgaagactttaaatcggagcctgtttcacctcaggatttttctttctccaagaatggtctgctaagtcgattgctaagacaaaatcaagatagttacctggcagatgattcagacaggagtcacagaaataatgaaatggcacttctagaatcaaagaatctttgcatggtccctaagaaaaggaagctttatactgagccattagaaaatccatttaaaaagatgaaaaacaacattgttgatgctgcaaacaatcacagtgccccagaagtactgtatgggtccttgcttaaccaggaagagctgaaatttagcagaaatgatcttgaatttaaatatcctgctggtcatggctcagccagcgaaagtgaacacaggagttgggccagagagagcaaaagctttaatgttctgaaacagctgcttctctcagaaaactgtgtgcgagatttgtccccgcacagaagtaactctgtggctgacagtaaaaagaaaggacacaaaaataatgtgaccaacagcaaacctgaatttagcatttcttctttaaatggactgatgtacagttccactcagcccagcagttgcatggataacaggacattttcatacccaggtgtagtaaaaactcctgtgagtcctactttccctgagcacttgggctgtgcagggtctagaccagaatctgggcttttgaatgggtgttccatgcccagtgagaaaggacccattaagtgggttatcactgatgcggagaagaatgagtatgaaaaagactctccaagattgaccaaaaccaacccaatactatattacatgcttcaaaaaggaggcaattctgttaccagtcgagaaacacaagacaaggacatttggagggaggcttcatctgctgaaagtgtctcacaggtcacagccaaagaagagttacttcctactgcagaaacgaaagcttctttctttaatttaagaagcccttacaatagccatatgggaaataatgcttctcgcccacacagcgcaaatggagaagtttatggacttctgggaagcgtgctaacgataaagaaagaatcagaataaaatgtacctgccatccagttttggatctttttaaaactaatgagtatgaacttgagatctgtataaataagagcatgatttgaaaaaaagcatggtataattgaaacttttttcattttgaaaagtattggttactggtgatgttgaaatatgcatactaatttttgcttaacattagatgtcatgaggaaactactgaactagcaattggttgtttaacacttctgtatgcntcagataacaactgtgagtagcctatgaatgaaattcttttataaatattaggcataaattaaaatgtaaaactccattcatagtggattaatgcattttgctgcctttattagggtactttattttgcttttcagaagtcagcctacataacacatttttaaagtctaaactgttaaacaactctttaaaggataattatccaataaaaaaaaacctagtgctgattcacagcttattatccaattcaaaaataaattagaaaaatatatgcttacatttttcacttttgctaaaaanaaaaaaaaanggtgtttatttttaactcttggaagaggttttgtggttcccaatgtgtctgtcccaccctganccttttcaatatatatttctttaaaccttgtgctacttagtaaaaattgattacaattgagggaagtttgatagatcctttaaaaaaaaggcagatttccattttttgtattttaactactttactaaattaatactcctccttttacanaattagaaaagttaacatttatctttaggtggtttcctgaaaagttgaatatttaagaaattgtttttaacagaagcaaaatggcttttctttggacagttttcaccatctcttgtaaaagttaattctcaccattcctgtggtacctgcgagtgttatgaccaggattccttaaacctgaactcagaccacttgcattagaaccatctggagcacttgttttaaaatgcagattcataggcagcatctcagatctacagaacaagaatctctgctaagtggacctggaatcttccatctgcatcttaacatgctctctaggtgtttcttgtgtttgagaaccatgacttatgactttcctcagaacatgagactgtaaaacaaaaacaaaaaactatgtgatgcctctattttccccaatacagtcacacatcagctcaaaatttgcaatattgtagttnatatattaccgttatntctttggaaatccgggttcagaacactttttatgacaaaaattgggtggaggggataactttcatatctggctcaacatctcaggaaaatctgtgattatttgtgtgttctaatgagtaacatctacttagttagccttagggatggaaaaacagggccacttaccaaactcaggtgattccaggatggtttggaaacttctcctgaatgcatccttaacctttattaaaaccattgtcctaagaacaatgccaacaaagcttacaacatttagtttaaacccaagaaggncactaaactcagattgactaaataaaaagtacaaagggcacatatacgtgacagaattggtacacaatcactccattggatcttttactttaaagtagtgatgaaaagtacatgttgatactgtcttagaagaaattaatatattagtgaagccacatggggtttcagttgcgaaacaggtctgtttttatgttcagtttgtacaatccacaattcattcaccagatattttgttcttaattgtgnnccaggttagcaaatgacctatcaaaaattattctataatcactactagttaggatattgatttaaaattgttctacttgaagtggtttctaagatttttatatttaaaaataggtgtgatttcctaatatgatctaaaaccctaaatggttatttttcctcagaatgatttgtaaatagctactggaaatattatacagtaataggagtgggtattatgcaacatcatggagaagtgaaggcataggcttattctgacataaaattccactggccagttgaatatattctattccatgtccatactntgacaatcttattgtcaacactatataaataagcttttaaacaagtcatttttcttgatcgttgtggaaggtttggagccttagaggtatgtcagaaaaaatatgttggtattctcccttgggtagggggaaatgacctttttacaagagagatgaaatttaggtcagggaaaagaccaagggccagcatngctacttttgtgtgtgtgtgtgtgggttttgttttgttttttttggttggctggttgttttcgttgttgttaacaaaggaatgagaatatgtaatacttaaataaacatgaccacnaagaatgctgttctgatttactagagaatgttcccaatttgaatttagggtgattttaaagaacagtgagaaagggcatacatccacagattcactttgtttatgcatatgtagatacaaggatgcacatatacacattttcaaggactattttagatatctagacaatttcttctaataaagtcatttgtgaaagggtactacagcttattgacatcagtaaggtagcattcattacctgtttattctctgctgcatcttacagaagagtaaactggtgagagtatatattttatatatatatatatatatannnnnnnnatatgtatatatatatatattgacttgttacatgaagatgttaaaatcggtttttaaaggtgatgtaaatagtgatttccttaatgaaaaatacatattttgtattgttctaatgcaacagaaaagccttttaatctctttggttcctgtatattccatgtataagtgtaaatataatcagacaggtttaaaagttgtgcatgtatgtatacagttgcaagtctggacaaatgtatagaataaaccttttatttaagttgtgattacctgctgcatgaaaagtggcatgggggaccctgtgcatctgtgcatttggcaaaatgtcttaacaaatcagatcagatgttcatcctaacatgacagtattccatttctggacatgacgtctgtggtttaagctttgtgaaagaatgtgctttgattcgaagggtcttaaagaatttttttaatcgtcaaccacttttaaacataaagaattcacacaactactttcatgaattttttaatcccattgcaaacattattccaagagtatcccagtattagcaatactggaatataggcacattaccattcatagtaagaattctggtgtttacacaaccaaatttgatgcgatctgctcagtaatataatttgccatttttattagaaatttaatttcttcatgtgatgtcatgaaactgtacatactgcagtgtgaatttttttgttttgttttttaatcttttagtgtttacttcctgcagtgaatttgaataaatgagaaaaaatgcannnnnaaaaaaaaaaaaaaaaaaaa

SEQ ID NO: 75 - DNA, 1530 bp, Homo sapiens
  misc_feature: cyclin B2 (Homo sapiens)
aatcctggaacaaggctacagcgtcgaagatccccagcgctgcgggctcggagagcagtcctaacggcgcctcgtacgctagtgtcctcccttttcagtccgcgtccctccctgggccgggctggcactcttgccttccccgtccctcatggcgctgctccgacgcccgacggtgtccagtgatttggagaatattgacacaggagttaattctaaagttaagagtcatgtgactattaggcgaactgttttagaagaaattggaaatagagttacaaccagagcagcacaagtagctaagaaagctcagaacaccaaagttccagttcaacccaccaaaacaacaaatgtcaacaaacaactgaaacctactgcttctgtcaaaccagtacagatggaaaagttggctccaaagggtccttctcccacacctgaggatgtctccatgaaggaagagaatctctgccaagctttttctgatgccttgctctgcaaaatcgaggacattgataacgaagattgggagaaccctcagctctgcagtgactacgttaaggatatctatcagtatctcaggcagctggaggttttgcagtccataaacccacatttcttagatggaagagatataaatggacgcatgcgtgccatcctagtggattggctggtacaagtccactccaagtttaggcttctgcaggagactctgtacatgtgcgttggcattatggatcgatttttacaggttcagccagtttcccggaagaagcttcaattagttgggattactgctctgctcttggcttccaagtatgaggagatgttttctccaaatattgaagactttgtttacatcacagacaatgcttataccagttcccaaatccgagaaatggaaactctaattttgaaagaattgaaatttgagttgggtcgacccttgccactacacttcttaaggcgagcatcaaaagccggggaggttgatgttgaacagcacactttagccaagtatttgatggagctgactctcatcgactatgatatggtgcattatcatccttctaaggtagcagcagctgcttcctgcttgtctcagaaggttctaggacaaggaaaatggaacttaaagcagcagtattacacaggatacacagagaatgaagtattggaagtcatgcagcacatggccaagaatgtggtgaaagtaaatgaaaacttaactaaattcatcgccatcaagaataagtatgcaagcagcaaactcctgaagatcagcatgatccctcagctgaactcaaaagccgtcaaagaccttgcctccccactgataggaaggtcctaggctgccgtgggccctggggatgtgtgcttcattgtgccctttttcttattggtttagaactcttgattttgtacatagtcctctggtctatctcatgaaacctcttctcagaccagttttctaaacatatattgaggaaaaataaagcgattggtttttcttaaggtaaaaaaaaaaaaaaaaaa

SEQ ID NO: 76 - DNA, 3775 bp, Homo sapiens
  misc_feature: FBJ murine osteosarcoma viral oncogene homolog B(Homo sapiens)
cattcataagactcagagctacggccacggcagggacacgcggaaccaagacttggaaacttgattgttgtggttcttcttgggggttatgaaatttcattaatcttttttttttccggggagaaagtttttggaaagattcttccagatatttcttcattttcttttggaggaccgacttactttttttggtcttctttattactcccctccccccgtgggacccgccggacgcgtggaggagaccgtagctgaagctgattctgtacagcgggacagcgctttctgcccctgggggagcaacccctccctcgcccctgggtcctacggagcctgcactttcaagaggtacagcggcatcctgtgggggcctgggcaccgcaggaagactgcacagaaactttgccattgttggaacgggacgttgctccttccccgagcttccccggacagcgtactttgaggactcgctcagctcaccggggactcccacggctcaccccggacttgcaccttacttccccaacccggccatagccttggcttcccggcgacctcagcgtggtcacaggggcccccctgtgcccagggaaatgtttcaggctttccccggagactacgactccggctcccggtgcagctcctcaccctctgccgagtctcaatatctgtcttcggtggactccttcggcagtccacccaccgccgcggcctcccaggagtgcgccggtctcggggaaatgcccggttccttcgtgcccacggtcaccgcgatcacaaccagccaggacctccagtggcttgtgcaacccaccctcatctcttccatggcccagtcccaggggcagccactggcctcccagcccccggtcgtcgacccctacgacatgccgggaaccagctactccacaccaggcatgagtggctacagcagtggcggagcgagtggcagtggtgggccttccaccagcggaactaccagtgggcctgggcctgcccgcccagcccgagcccggcctaggagaccccgagaggagacgctcaccccagaggaagaggagaagcgaagggtgcgccgggaacgaaataaactagcagcagctaaatgcaggaaccggcggagggagctgaccgaccgactccaggcggagacagatcagttggaggaagaaaaagcagagctggagtcggagatcgccgagctccaaaaggagaaggaacgtctggagtttgtgctggtggcccacaaaccgggctgcaagatcccctacgaagaggggcccgggccgggcccgctggcggaggtgagagatttgccgggctcagcaccggctaaggaagatggcttcagctggctgctgccgcccccgccaccaccgcccctgcccttccagaccagccaagacgcaccccccaacctgacggcttctctctttacacacagtgaagttcaagtcctcggcgaccccttccccgttgttaacccttcgtacacttcttcgtttgtcctcacctgcccggaggtctccgcgttcgccggcgcccaacgcaccagcggcagtgaccagccttccgatcccctgaactcgccctccctcctcgctcggtgaactctttagacacacaaaacaaacaaacacatgggggagagagacttggaagaggaggaggaggaggagaaggaggagagagaggggaagagacaaagtgggtgtgtggcctccctggctcctccgtctgaccctctgcggccactgcgccactgccatcggacaggaggattccttgtgttttgtcctgcctcttgtttctgtgccccggcgaggccggagagctggtgactttggggacagggggtgggaaggggatggacacccccagctgactgttggctctctgacgtcaacccaagctctggggatgggtggggaggggggcgggtgacgcccaccttcgggcagtcctgtgtgaggatgaagggacgggggtgggaggtaggctgtggggtgggctggagtcctctccagagaggctcaacaaggaaaaatgccactccctacccaatgtctcccacacccaccctttttttggggtgcccaggttggtttcccctgcactcccgaccttagcttattgatcccacatttccatggtgtgagatcctctttactctgggcagaagtgagcccccccttaaagggaattcgatgcccccctagaataatctcatccccccacccgacttcttttgaaatgtgaacgtccttccttgactgtctagccactccctcccagaaaaactggctctgattggaatttctggcctcctaaggctccccaccccgaaatcagcccccagccttgtttctgatgacagtgttatcccaagaccctgccccctgccagccgaccctcctggccttcctcgttgggccgctctgatttcaggcagcaggggctgctgtgatgccgtcctgctggagtgatttatactgtgaaatgagttggccagattgtggggtgcagctgggtggggcagcacacctctggggggataatgtccccactcccgaaagcctttcctcggtctcccttccgtccatcccccttcttcctcccctcaacagtgagttagactcaagggggtgacagaaccgagaagggggtgacagtcctccatccacgtggcctctctctctctcctcaggaccctcagccctggcctttttctttaaggtcccccgaccaatccccagcctaggacgccaacttctcccaccccttggcccctcacatcctctccaggaaggcagtgaggggctgtgacatttttccggagaagatttcagagctgaggctttggtacccccaaacccccaatatttttggactggcagactcaaggggctggaatctcatgattccatgcccgagtccgcccatccctgaccatggttttggctctcccaccccgccgttccctgcgcttcatctcatgaggatttctttatgaggcaaatttatattttttaatatcggggggtggaccacgccgccctccatccgtgctgcatgaaaaacattccacgtgccccttgtcgcgcgtctcccatcctgatcccagacccattccttagctatttatccctttcctggtttccgaaaggcaattatatctattatgtataagtaaatatattatatatggatgtgtgtgtgtgcgtgcgcgtgagtgtgtgagcgcttctgcagcctcggcctaggtcacgttggccctcaaagcgagccgttgaattggaaactgcttctagaaactctggctcagcctgtctcgggctgacccttttctgatcgtctcggcccctctgattgttcccgatggtctctctccctctgtcttttctcctccgcctgtgtccatctgaccgttttcacttgtctcctttctgactgtccctgccaatgctccagctgtcgtctgactctgggttcgttggggacatgagattttattttttgtgagtgagactgagggatcgtagatttttacaatctgtatctttgacaattctgggtgcgagtgtgagagtgtgagcagggcttgctcctgccaaccacaattcaatgaatccccgacccccctaccccatgctgtacttgtggttctctttttgtattttgcatctgaccccggggggctgggacagattggcaatgggccgtcccctctccccttggttctgcactgttgccaataaaaagctcttaaaaacgc

SEQ ID NO: 77 - DNA, 890 bp, Homo sapiens
  misc_feature: ubiquitin-conjugating enzyme E2S(Homo sapiens)
ggcggaccgaagaacgcaggaagggggccggggggacccgcccccggccggccgcagccatgaactccaacgtggagaacctacccccgcacatcatccgcctggtgtacaaggaggtgacgacactgaccgcagacccacccgatggcatcaaggtctttcccaacgaggaggacctcaccgacctccaggtcaccatcgagggccctgaggggaccccatatgctggaggtctgttccgcatgaaactcctgctggggaaggacttccctgcctccccacccaagggctacttcctgaccaagatcttccacccgaacgtgggcgccaatggcgagatctgcgtcaacgtgctcaagagggactggacggctgagctgggcatccgacacgtactgctgaccatcaagtgcctgctgatccaccctaaccccgagtctgcactcaacgaggaggcgggccgcctgctcttggagaactacgaggagtatgcggctcgggcccgtctgctcacagagatccacgggggcgccggcgggcccagcggcagggccgaagccggtcgggccctggccagtggcactgaagcttcctccaccgaccctggggccccagggggcccgggaggggctgagggtcccatggccaagaagcatgctggcgagcgcgataagaagctggcggccaagaaaaagacggacaagaagcgggcgctgcgggcgctgcggcggctgtagtgggctctcttcctccttccaccgtgaccccaacctctcctgtcccctccctccaactctgtctctaagttatttaaattatggctggggtcggggagggtacagggggcactgggacctggatttgtttttctaaataaagttggaaaagca

SEQ ID NO: 78 - DNA, 5496 bp, Homo sapiens
  misc_feature: aryl hydrocarbon receptor(Homo sapiens)
attcagccggtgcgcgcggcggcgggaggcagtggctggggagtcccgtcgacgctctgttccgagagcgtgccccggaccgccagctcagaacaggggcagccgtgtagccgaacggaagctgggagcagccgggactggtggcccgcgcccgagctccgcaggcgggaagcaccctggatttgggaagtcccgggagcagcgcggcggcacctccctcacccaaggggccgcggcgacggtcacggggcgcggcgccaccgtgagcgacccaggccaggattctaaatagacggcccaggctcctcctccgcccgggccgcctcacctgcgggcattgccgcgccgcctccgccggtgtagacggcacctgcgccgccttgctcgcgggtctccgcccctcgcccaccctcactgcgccaggcccaggcagctcacctgtactggcgcgggctgcggaagcctgcgtgagccgaggcgttgaggcgcggcgcccacgccactgtcccgagaggacgcaggtggagcgggcgcggcttcgcggaacccggcgccggccgccgcagtggtcccagcctacaccgggttccggggacccggccgccagtgcccggggagtagccgccgccgtcggctgggcaccatgaacagcagcagcgccaacatcacctacgccagtcgcaagcggcggaagccggtgcagaaaacagtaaagccaatcccagctgaaggaatcaagtcaaatccttccaagcggcatagagaccgacttaatacagagttggaccgtttggctagcctgctgcctttcccacaagatgttattaataagttggacaaactttcagttcttaggctcagcgtcagttacctgagagccaagagcttctttgatgttgcattaaaatcctcccctactgaaagaaacggaggccaggataactgtagagcagcaaatttcagagaaggcctgaacttacaagaaggagaattcttattacaggctctgaatggctttgtattagttgtcactacagatgctttggtcttttatgcttcttctactatacaagattatctagggtttcagcagtctgatgtcatacatcagagtgtatatgaacttatccataccgaagaccgagctgaatttcagcgtcagctacactgggcattaaatccttctcagtgtacagagtctggacaaggaattgaagaagccactggtctcccccagacagtagtctgttataacccagaccagattcctccagaaaactctcctttaatggagaggtgcttcatatgtcgtctaaggtgtctgctggataattcatctggttttctggcaatgaatttccaagggaagttaaagtatcttcatggacagaaaaagaaagggaaagatggatcaatacttccacctcagttggctttgtttgcgatagctactccacttcagccaccatccatacttgaaatccggaccaaaaattttatctttagaaccaaacacaaactagacttcacacctattggttgtgatgccaaaggaagaattgttttaggatatactgaagcagagctgtgcacgagaggctcaggttatcagtttattcatgcagctgatatgctttattgtgccgagtcccatatccgaatgattaagactggagaaagtggcatgatagttttccggcttcttacaaaaaacaaccgatggacttgggtccagtctaatgcacgcctgctttataaaaatggaagaccagattatatcattgtaactcagagaccactaacagatgaggaaggaacagagcatttacgaaaacgaaatacgaagttgccttttatgtttaccactggagaagctgtgttgtatgaggcaaccaacccttttcctgccataatggatcccttaccactaaggactaaaaatggcactagtggaaaagactctgctaccacatccactctaagcaaggactctctcaatcctagttccctcctggctgccatgatgcaacaagatgagtctatttatctctatcctgcttcaagtacttcaagtactgcaccttttgaaaacaactttttcaacgaatctatgaatgaatgcagaaattggcaagataatactgcaccgatgggaaatgatactatcctgaaacatgagcaaattgaccagcctcaggatgtgaactcatttgctggaggtcacccagggctctttcaagatagtaaaaacagtgacttgtacagcataatgaaaaacctaggcattgattttgaagacatcagacacatgcagaatgaaaaatttttcagaaatgatttttctggtgaggttgacttcagagacattgacttaacggatgaaatcctgacgtatgtccaagattctttaagtaagtctcccttcataccttcagattatcaacagcaacagtccttggctctgaactcaagctgtatggtacaggaacacctacatctagaacagcaacagcaacatcaccaaaagcaagtagtagtggagccacagcaacagctgtgtcagaagatgaagcacatgcaagttaatggcatgtttgaaaattggaactctaaccaattcgtgcctttcaattgtccacagcaagacccacaacaatataatgtctttacagacttacatgggatcagtcaagagttcccctacaaatctgaaatggattctatgccttatacacagaactttatttcctgtaatcagcctgtattaccacaacattccaaatgtacagagctggactaccctatggggagttttgaaccatccccataccccactacttctagtttagaagattttgtcacttgtttacaacttcctgaaaaccaaaagcatggattaaatccacagtcagccataataactcctcagacatgttatgctggggccgtgtcgatgtatcagtgccagccagaacctcagcacacccacgtgggtcagatgcagtacaatccagtactgccaggccaacaggcatttttaaacaagtttcagaatggagttttaaatgaaacatatccagctgaattaaataacataaataacactcagactaccacacatcttcagccacttcatcatccgtcagaagccagaccttttcctgatttgacatccagtggattcctgtaattccaagcccaattttgaccctggtttttggattaaattagtttgtgaaggattatggaaaaataaaactgtcactgttggacgtcagcaagttcacatggaggcattgatgcatgctattcacaattattccaaaccaaattttaatttttgcttttagaaaagggagtttaaaaatggtatcaaaattacatatactacagtcaagatagaaagggtgctgccacggagtggtgaggtaccgtctacatttcacattattctgggcaccacaaaatatacaaaactttatcagggaaactaagattcttttaaattagaaaatattctctatttgaattatttctgtcacagtaaaaataaaatactttgagttttgagctactggattcttattagttccccaaatacaaagttagagaactaaactagtttttcctatcatgttaacctctgcttttatctcagatgttaaaataaatggtttggtgctttttataaaaagataatctcagtgctttcctccttcactgtttcatctaagtgcctcacatttttttctacctataacactctaggatgtatattttatataaagtattctttttcttttttaaattaatatctttctgcacacaaatattatttgtgtttcctaaatccaaccaattttcattaattcaggcatattttaactccactgcttacctactttcttcaggtaaaagggcaaataatgatcgaaaaaataattatttattacataatttagttgtttctagactataaatgttgctatgtgccttatgttgaaaaaatttaaaagtaaaatgtctttccaaattatttcttaattattataaaaatattaagacaatagcacttaaattcctcaacagtgttttcagaagaaataaatataccactctttacctttattgatatctccatgatgatagttgaatgttgcaatgtgaaaaatctgctgttaactgcaaccttgtttattaaattgcaagaagctttatttctagctttttaattaagcaaagcacccatttcaatgtgtataaattgtctttaaaaactgttttagacctataatccttgataatatattgtgttgactttataaatttcgcttcttagaacagtggaaactatgtgtttttctcatatttgaggagtgttaagattgcagatagcaaggtttggtgcaaagtattgtaatgagtgaattgaatggtgcattgtatagatataatgaacaaaattatttgtaagatatttgcagtttttcattttaaaaagtccataccttatatatgcacttaatttgttggggctttacatactttatcaatgtgtctttctaagaaatcaagtaatgaatccaactgcttaaagttggtattaataaaaagacaaccacatagttcgtttaccttcaaactttaggtttttttaatgatatactgatcttcattaccaataggcaaattaatcaccctaccaactttactgtcctaacatggactttcaaaaagaaaaaatgacaccatcttttattctttttttttttttttttttgagagagagtcttactctgccgcccaaactggagtgcagtggcacaatcttggctcactgcaacctctacctcctgggttcaagtgattctcttgcctcagcctcccgagttgctgggattgcgggcatggtggcgtgagcctgtagtcctagctactcgggaggctgaggcaggagaatagcctgaacctgggaatcggaggttgcagggccaagatcgccccactgcactccagcctggcaatagaccgagctccgtctccaaaaaaaaaaatacaatttttatttcttttactttttttagtaagttaatgtatataaaaatggcttcggacaaaatatctctgagttctgtgtattttcagtcaaaactttaaacctgtagaatcaatttaagtgttgaaaaaaatttgtctgaaacatttcataatttgtttccagcatgaggtatctaaggatttagaccagaggtctagattaatactctatttttacatttaaaccttttattataagtcttacataaaccatttttgttactctcttccacatgttactggataaattgtttagtggaaaataggctttttaatcatgaatatgatgacaatcagttatacagttataaaattaaaagtttgaaaagcaatattgtatatttttatctatataaaataactaaaatgtatctaagaataataaaatcacgttaaacc

SEQ ID NO: 79 - DNA, 1686 bp, Homo sapiens
  misc_feature: CDC20 cell division cycle 20 homolog (S. cerevisiae) (Homo sapiens)
ccacgcgtccgggcgtaagccaggcgtgttaaagccggtcggaactgctccggagggcacgggctccgtaggcaccaactgcaaggacccctccccctgcgggcgctcccatggcacagttcgcgttcgagagtgacctgcactcgctgcttcagctggatgcacccatccccaatgcaccccctgcgcgctggcagcgcaaagccaaggaagccgcaggcccggccccctcacccatgcgggccgccaaccgatcccacagcgccggcaggactccgggccgaactcctggcaaatccagttccaaggttcagaccactcctagcaaacctggcggtgaccgctatatcccccatcgcagtgctgcccagatggaggtggccagcttcctcctgagcaaggagaaccagtctgaaaacagccagacgcccaccaagaaggaacatcagaaagcctgggctttgaacctgaacggttttgatgtagaggaagccaagatccttcggctcagtggaaaaccacaaaatgcgccagagggttatcagaacagactgaaagtactctacagccaaaaggccactcctggctccagccggaagacctgccgttacattccttccctgccagaccgtatcctggatgcgcctgaaatccgaaatgactattacctgaaccttgtggattggagttctgggaatgtactggccgtggcactggacaacagtgtgtacctgtggagtgcaagctctggtgacatcctgcagcttttgcaaatggagcagcctggggaatatatatcctctgtggcctggatcaaagagggcaactacttggctgtgggcaccagcagtgctgaggtgcagctatgggatgtgcagcagcagaaacggcttcgaaatatgaccagtcactctgcccgagtgggctccctaagctggaacagctatatcctgtccagtggttcacgttctggccacatccaccaccatgatgttcgggtagcagaacaccatgtggccacactgagtggccacagccaggaagtgtgtgggctgcgctgggccccagatggacgacatttggccagtggtggtaatgataacttggtcaatgtgtggcctagtgctcctggagagggtggctgggttcctctgcagacattcacccagcatcaaggggctgtcaaggccgtagcatggtgtccctggcagtccaatgtcctggcaacaggagggggcaccagtgatcgacacattcgcatctggaatgtgtgctctggggcctgtctgagtgccgtggatgcccattcccaggtgtgctccatcctctggtctccccattacaaggagctcatctcaggccatggctttgcacagaaccagctagttatttggaagtacccaaccatggccaaggtggctgaactcaaaggtcacacatcccgggtcctgagtctgaccatgagcccagatggggccacagtggcatccgcagcagcagatgagaccctgaggctatggcgctgttttgagttggaccctgcgcggcggcgggagcgggagaaggccagtgcagccaaaagcagcctcatccaccaaggcatccgctgaagaccaacccatcacctcagttgttttttatttttctaataaagtcatgtctcccttcatgtttttttttttaaaa

SEQ ID NO: 80 - DNA, 6699 bp, Homo sapiens
  misc_feature: complement component 1, q subcomponent, receptor 1(Homo sapiens)
aaagccctcagcctttgtgtccttctctgcgccggagtggctgcagctcacccctcagctccccttggggcccagctgggagccgagatagaagctcctgtcgccgctgggcttctcgcctcccgcagagggccacacagagaccgggatggccacctccatgggcctgctgctgctgctgctgctgctcctgacccagcccggggcggggacgggagctgacacggaggcggtggtctgcgtggggaccgcctgctacacggcccactcgggcaagctgagcgctgccgaggcccagaaccactgcaaccagaacgggggcaacctggccactgtgaagagcaaggaggaggcccagcacgtccagcgagtactggcccagctcctgaggcgggaggcagccctgacggcgaggatgagcaagttctggattgggctccagcgagagaagggcaagtgcctggaccctagtctgccgctgaagggcttcagctgggtgggcgggggggaggacacgccttactctaactggcacaaggagctccggaactcgtgcatctccaagcgctgtgtgtctctgctgctggacctgtcccagccgctccttcccaaccgcctgcccaagtggtctgagggcccctgtgggagcccaggctcccccggaagtaacattgagggcttcgtgtgcaagttcagcttcaaaggcatgtgccggcctctggccctggggggcccaggtcaggtgacctacaccacccccttccagaccaccagttcctccttggaggctgtgccctttgcctctgcggccaatgtagcctgtggggaaggtgacaaggacgagactcagagtcattatttcctgtgcaaggagaaggcccccgatgtgttcgactggggcagctcgggccccctctgtgtcagccccaagtatggctgcaacttcaacaatgggggctgccaccaggactgctttgaagggggggatggctccttcctctgcggctgccgaccaggattccggctgctggatgacctggtgacctgtgcctctcgaaacccttgcagctccagcccatgtcgtgggggggccacgtgcgtcctgggaccccatgggaaaaactacacgtgccgctgcccccaagggtaccagctggactcgagtcagctggactgtgtggacgtggatgaatgccaggactccccctgtgcccaggagtgtgtcaacacccctgggggcttccgctgcgaatgctgggttggctatgagccgggcggtcctggagagggggcctgtcaggatgtggatgagtgtgctctgggtcgctcgccttgcgcccagggctgcaccaacacagatggctcatttcactgctcctgtgaggagggctacgtcctggccggggaggacgggactcagtgccaggacgtggatgagtgtgtgggcccggggggccccctctgcgacagcttgtgcttcaacacacaagggtccttccactgtggctgcctgccaggctgggtgctggccccaaatggggtctcttgcaccatggggcctgtgtctctgggaccaccatctgggccccccgatgaggaggacaaaggagagaaagaagggagcaccgtgccccgcgctgcaacagccagtcccacaaggggccccgagggcacccccaaggctacacccaccacaagtagaccttcgctgtcatctgacgcccccatcacatctgccccactcaagatgctggcccccagtgggtcctcaggcgtctggagggagcccagcatccatcacgccacagctgcctctggcccccaggagcctgcaggtggggactcctccgtggccacacaaaacaacgatggcactgacgggcaaaagctgcttttattctacatcctaggcaccgtggtggccatcctactcctgctggccctggctctggggctactggtctatcgcaagcggagagcgaagagggaggagaagaaggagaagaagccccagaatgcggcagacagttactcctgggttccagagcgagctgagagcagggccatggagaaccagtacagtccgacacctgggacagactgctgaaagtgaggtggccctagagacactagagtcaccagccaccatcctcagagctttgaactccccattccaaaggggcacccacatttttttgaaagactggactggaatcttagcaaacaattgtaagtctcctccttaaaggccccttggaacatgcaggtattttctacgggtgtttgatgttcctgaagtggaagctgtgtgttggcgtgccacggtggggatttcgtgactctataatgattgttactccccctcccttttcaaattccaatgtgaccaattccggatcagggtgtgaggaggctggggctaaggggctcccctgaatatcttctctgctcacttccaccatctaagaggaaaaggtgagttgctcatgctgattaggattgaaatgatttgtttctcttcctaggatgaaaactaaatcaattaattattcaattaggtaagaagatctggttttttggtcaaagggaacatgttcggactggaaacatttctttacatttgcattcctccatttcgccagcacaagtcttgctaaatgtgatactgttgacatcctccagaatggccagaagtgcaattaacctcttaggtggcaaggaggcaggaagtgcctctttagttcttacatttctaatagccttgggtttatttgcaaaggaagcttgaaaaatatgagaaaagttgcttgaagtgcattacaggtgtttgtgaagtcacataatctacggggctagggcgagagaggccagggatttgttcacagatacttgaattaattcatccaaatgtactgaggttaccacacacttgactacggatgtgatcaacactaacaaggaaacaaattcaaggacaacctgtctttgagccagggcaggcctcagacaccctgcctgtggccccgcctccacttcatcctgcccggaatgccagtgctccgagctcagacagaggaagccctgcagaaagttccatcaggctgtttcctaaaggatgtgtgaacgggagatgatgcactgtgttttgaaagttgtcattttaaagcattttagcacagttcatagtccacagttgatgcagcatcctgagattttaaatcctgaagtgtgggtggcgcacacaccaagtagggagctagtcaggcagtttgcttaaggaacttttgttctctgtctcttttccttaaaattgggggtaaggagggaaggaagagggaaagagatgactaactaaaatcatttttacagcaaaaactgctcaaagccatttaaattatatcctcattttaaaagttacatttgcaaatatttctccctatgataatgcagtcgatagtgtgcactctttctctctctctctctctctcacacacacacacacacacacacacacacacacagagacacggcaccattctgcctggggcactggaacacattcctgggggtcaccgatggtcagagtcactagaagttacctgagtatctctgggaggcctcatgtctcctgtgggctttttaccaccactgtgcaggagaacagacagaggaaatgtgtctccctccaaggccccaaagcctcagagaaagggtgtttctggttttgccttagcaatgcatcggtctctgaggtgacactctggagtggttgaagggccacaaggtgcagggttaatactcttgccagttttgaaatatagatgctatggttcagattgtttttaatagaaaactaaaggggcaggggaagtgaaaggaaagatggaggttttgtgcggctcgatggggcatttggaacttctttttaaagtcatctcatggtctccagttttcagttggaactctggtgtttaacacttaagggagacaaaggctgtgtccatttggcaaaacttccttggccacgagactctaggtgatgtgtgaagctgggcagtctgtggtgtggagagcagccatctgtctggccattcagaggattctaaagacatggctggatgcgctgctgaccaacatcagcacttaaataaatgcaaatgcaacatttctccctctgggccttgaaaatccttgcccttatcatttggggtgaaggagacatttctgtccttggcttcccacagccccaacgcagtctgtgtatgattcctgggatccaacgagccctcctattttcacagtgttctgattgctctcacagcccaggcccatcgtctgttctctgaatgcagccctgttctcaacaacagggaggtcatggaacccctctgtggaacccacaaggggagaaatgggtgataaagaatccagttcctcaaaaccttccctggcaggctgggtccctctcctgctgggtggtgctttctcttgcacaccactcccaccacggggggagagccagcaacccaaccagacagctcaggttgtgcatctgatggaaaccactgggctcaaacacgtgctttattctcctgtttatttttgctgttactttgaagcatggaaattcttgtttgggggatcttggggctacagtagtgggtaaacaaatgcccaccggccaagaggccattaacaaatcgtccttgtcctgaggggccccagcttgctcgggcgtggcacagtggggaatccaagggtcacagtatggggagaggtgcaccctgccacctgctaacttctcgctagacacagtgtttctgcccaggtgacctgttcagcagcagaacaagccagggccatggggacgggggaagttttcacttggagatggacaccaagacaatgaagatttgttgtccaaataggtcaataattctgggagactcttggaaaaaactgaatatattcaggaccaactctctccctcccctcatcccacatctcaaagcagacaatgtaaagagagaacatctcacacacccagctcgccatgcctactcattcctgaatttcaggtgccatcactgctctttctttcttctttgtcatttgagaaaggatgcaggaggacaattcccacagataatctgaggaatgcagaaaaaccagggcaggacagttatcgacaatgcattagaacttggtgagcatcctctgtagagggactccacccctgctcaacagcttggcttccaggcaagaccaaccacatctggtctctgccttcggtggcccacacacctaagcgtcatcgtcattgccatagcatcatgatgcaacacatctacgtgtagcactacgacgttatgtttgggtaatgtggggatgaactgcatgaggctctgattaaggatgtggggaagtgggctgcggtcactgtcggccttgcaaggccacctggaggcctgtctgttagccagtggtggaggagcaaggcttcaggaagggccagccacatgccatcttccctgcgatcaggcaaaaaagtggaattaaaaagtcaaacctttatatgcatgtgttatgtccattttgcaggatgaactgagtttaaaagaatttttttttctcttcaagttgctttgtcttttccatcctcatcacaagcccttgtttgagtgtcttatccctgagcaatctttcgatggatggagatgatcattaggtacttttgtttcaacctttattcctgtaaatatttctgtgaaaactaggagaacagagatgagatttgacaaaaaaaaattgaattaaaaataacacagtctttttaaaactaacataggaaagcctttcctattatttctcttcttagcttctccattgtctaaatcaggaaaacaggaaaacacagctttctagcagctgcaaaatggtttaatgccccctacatatttccatcaccttgaacaatagctttagcttgggaatctgagatatgatcccagaaaacatctgtctctacttcggctgcaaaacccatggtttaaatctatatggtttgtgcattttctcaactaaaaatagagatgataatccgaattctccatatattcactaatcaaagacactattttcatactagattcctgagacaaatactcactgaagggcttgtttaaaaataaattgtgttttggtctgttcttgtagataatgcccttctattttaggtagaagctctggaatccctttattgtgctgttgctcttatctgcaaggtggcaagcagttcttttcagcagattttgcccactattcctctgagctgaagttctttgcatagatttggcttaagcttgaattagatccctgcaaaggcttgctctgtgatgtcagatgtaattgtaaatgtcagtaatcacttcatgaatgctaaatgagaatgtaagtatttttaaatgtgtgtatttcaaatttgtttgactaattctggaattacaagatttctatgcaggatttaccttcatcctgtgcatgtttcccaaactgtgaggagggaaggctcagagatcgagcttctcctctgagttctaacaaaatggtgctttgagggtcagcctttaggaaggtgcagctttgttgtcctttgagctttctgttatgtgcctatcctaataaactcttaaacacatt

SEQ ID NO: 81 - DNA, 3494 bp, Homo sapiens
  misc_feature: alanyl (membrane) aminopeptidase (aminopeptidase N, aminopeptidase M, microsomal aminopeptidase, CD13, p150) (Homo sapiens)
taatttttgcccagtctgcctgttgtggggctcctcccctttggggatataagcccggcctggggctgctccgttctctgcctggcctgaggctccctgagccgcctccccaccatcaccatggccaagggcttctatatttccaagtccctgggcatcctggggatcctcctgggcgtggcagccgtgtgcacaatcatcgcactgtcagtggtgtactcccaggagaagaacaagaacgccaacagctcccccgtggcctccaccaccccgtccgcctcagccaccaccaaccccgcctcggccaccaccttggaccaaagtaaagcgtggaatcgttaccgcctccccaacacgctgaaacccgattcctaccaggtgacgctgagaccgtacctcacccccaatgacaggggcctgtacgtttttaagggctccagcaccgtccgtttcacctgcaaggaggccactgacgtcatcatcatccacagcaagaagctcaactacaccctcagccaggggcacagggtggtcctgcgtggtgtgggaggctcccagccccccgacattgacaagactgagctggtggagcccaccgagtacctggtggtgcacctcaagggctccctggtgaaggacagccagtatgagatggacagcgagttcgagggggagttggcagatgacctggcgggcttctaccgcagcgagtacatggagggcaatgtcagaaaggtggtggccactacacagatgcaggctgcagatgcccggaagtccttcccatgcttcgatgagccggccatgaaggccgagttcaacatcacgcttatccaccccaaggacctgacagccctgtccaacatgcttcccaaaggtcccagcaccccacttccagaagaccccaactggaatgtcactgagttccacaccacgcccaagatgtccacgtacttgctggccttcattgtcagtgagttcgactacgtggagaagcaggcatccaatggtgtcttgatccggatctgggcccggcccagtgccattgcggcgggccacggcgattatgccctgaacgtgacgggccccatccttaacttctttgctggtcattatgacacaccctacccactcccaaaatcagaccagattggcctgccagacttcaacgccggcgccatggagaactggggactggtgacctaccgggagaactccctgctgttcgaccccctgtcctcctccagcagcaacaaggagcgggtggtcactgtgattgctcatgagctggcccaccagtggttcgggaacctggtgaccatagagtggtggaatgacctgtggctgaacgagggcttcgcctcctacgtggagtacctgggtgctgactatgcggagcccacctggaacttgaaagacctcatggtgctgaatgatgtgtaccgcgtgatggcagtggatgcactggcctcctcccacccgctgtccacacccgcctcggagatcaacacgccggcccagatcagtgagctgtttgacgccatctcctacagcaagggcgcctcagtcctcaggatgctctccagcttcctgtccgaggacgtattcaagcagggcctggcgtcctacctccacacctttgcctaccagaacaccatctacctgaacctgtgggaccacctgcaggaggctgtgaacaaccggtccatccaactccccaccaccgtgcgggacatcatgaaccgctggaccctgcagatgggcttcccggtcatcacggtggataccagcacggggaccctttcccaggagcacttcctccttgaccccgattccaatgttacccgcccctcagaattcaactacgtgtggattgtgcccatcacatccatcagagatggcagacagcagcaggactactggctgatagatgtaagagcccagaacgatctcttcagcacatcaggcaatgagtgggtcctgctgaacctcaatgtgacgggctattaccgggtgaactacgacgaagagaactggaggaagattcagactcagctgcagagagaccactcggccatccctgtcatcaatcgggcacagatcattaatgacgccttcaacctggccagtgcccataaggtccctgtcactctggcgctgaacaacaccctcttcctgattgaagagagacagtacatgccctgggaggccgccctgagcagcctgagctacttcaagctcatgtttgaccgctccgaggtctatggccccatgaagaactacctgaagaagcaggtcacacccctcttcattcacttcagaaataataccaacaactggagggagatcccagaaaacctgatggaccagtacagcgaggttaatgccatcagcaccgcctgctccaacggagttccagagtgtgaggagatggtctctggccttttcaagcagtggatggagaaccccaataataacccgatccaccccaacctgcggtccaccgtctactgcaacgctatcgcccagggcggggaggaggagtgggacttcgcctgggagcagttccgaaatgccacactggtcaatgaggctgacaagctccgggcagccctggcctgcagcaaagagttgtggatcctgaacaggtacctgagctacaccctgaacccggacttaatccggaagcaggacgccacctctaccatcatcagcattaccaacaacgtcattgggcaaggtctggtctgggactttgtccagagcaactggaagaagctttttaacgattatggtggtggctcgttctccttctccaacctcatccaggcagtgacacgacgattctccaccgagtatgagctgcagcagctggagcagttcaagaaggacaacgaggaaacaggcttcggctcaggcacccgggccctggagcaagccctggagaagacgaaagccaacatcaagtgggtgaaggagaacaaggaggtggtgctccagtggttcacagaaaacagcaaatagtccccagcccttgaagtcacccggccccgatgcaaggtgcccacatgtgtccatcccagcggctggtgcagggcctccattcctggagcccgaggcaccagtgtcctcccctcaaggacaaagtctccagcccacgttctctctgcctgtgagccagtctagttcctgatgacccaggctgcctgagcacctcccagcccctgcccctcatgccaaccccgccctaggcctggcatggcacctgtcgcccagtgccctggggctgatctcagggaagcccagctccagggccagatgagcagaagctctcgatggacaatgaacggccttgctgggggccgccctgtaccctctttcacctttccctaaagaccctaaatctgaggaatcaacagggcagcagatctgtatatttttttctaagagaaaatgtaaataaaggatttctagatgaaaaaaaaaaaaaaaaa

SEQ ID NO: 82 - DNA, 783 bp, Homo sapiens
  misc_feature: ubiquitin-conjugating enzyme E2C (Homo sapiens)
ggcacgagcgagttcctgtctctctgccaacgccgcccggatggcttcccaaaaccgcgacccagccgccactagcgtcgccgccgcccgtaaaggagctgagccgagcgggggcgccgcccggggtccggtgggcaaaaggctacagcaggagctgatgaccctcatgatgtctggcgataaagggatttctgccttccctgaatcagacaaccttttcaaatgggtagggaccatccatggagcagctggaacagtatatgaagacctgaggtataagctctcgctagagttccccagtggctacccttacaatgcgcccacagtgaagttcctcacgccctgctatcaccccaacgtggacacccagggtaacatatgcctggacatcctgaaggaaaagtggtctgccctgtatgatgtcaggaccattctgctctccatccagagccttctaggagaacccaacattgatagtcccttgaacacacatgctgccgagctctggaaaaaccccacagcttttaagaagtacctgcaagaaacctactcaaagcaggtcaccagccaggagccctgacccaggctgcccagcctgtccttgtgtcgtctttttaatttttccttagatggtctgtcctttttgtgatttctgtataggactctttatcttgagctgtggtatttttgttttgtttttgtcttttaaattaagcctcggttgagcccttgtatattaaataaatgcatttttgtccttttttaaaaaaaaaaaaaaaaaaa

SEQ ID NO: 83 - DNA, 2136 bp, Homo sapiens
  misc_feature: lymphotoxin beta receptor (TNFR superfamily, member 3) (Homo sapiens)
gccctggaggcccggcctggccgctcccggccctggggtgcacatcggccctgagtcccgtcccaggctctgggctcgggcagccgccgccaccgctgcccaggacgtcgggcctcctgccttcctcccaggcccccacgttgctggccgcctggccgagtggccgccatgctcctgccttgggccacctctgcccccggcctggcctgggggcctctggtgctgggcctcttcgggctcctggcagcatcgcagccccaggcggtgcctccatatgcgtcggagaaccagacctgcagggaccaggaaaaggaatactatgagccccagcaccgcatctgctgctcccgctgcccgccaggcacctatgtctcagctaaatgtagccgcatccgggacacagtttgtgccacatgtgccgagaattcctacaacgagcactggaactacctgaccatctgccagctgtgccgcccctgtgacccagtgatgggcctcgaggagattgccccctgcacaagcaaacggaagacccagtgccgctgccagccgggaatgttctgtgctgcctgggccctcgagtgtacacactgcgagctactttctgactgcccgcctggcactgaagccgagctcaaagatgaagttgggaagggtaacaaccactgcgtcccctgcaaggcagggcacttccagaatacctcctcccccagcgcccgctgccagccccacaccaggtgtgagaaccaaggtctggtggaggcagctccaggcactgcccagtccgacacaacctgcaaaaatccattagagccactgcccccagagatgtcaggaaccatgctgatgctggccgttctgctgccactggccttctttctgctccttgccaccgtcttctcctgcatctggaagagccacccttctctctgcaggaaactgggatcgctgctcaagaggcgtccgcagggagagggacccaatcctgtagctggaagctgggagcctccgaaggcccatccatacttccctgacttggtacagccactgctacccatttctggagatgtttccccagtatccactgggctccccgcagccccagttttggaggcaggggtgccgcaacagcagagtcctctggacctgaccagggagccgcagttggaacccggggagcagagccaggtggcccacggtaccaatggcattcatgtcaccggcgggtctatgactatcactggcaacatctacatctacaatggaccagtactggggggaccaccgggtcctggagacctcccagctacccccgaacctccataccccattcccgaagagggggaccctggccctcccgggctctctacaccccaccaggaagatggcaaggcttggcacctagcggagacagagcactgtggtgccacaccctctaacaggggcccaaggaaccaatttatcacccatgactgacggagtctgagaaaaggcagaagaaggggggcacaagggcactttctcccttgaggctgccctgcccacgtgggattcacaggggcctgagtagggcccggggaagcagagccctaagggattaaggctcagacacctctgagagcaggtgggcactggctgggtacggtgccctccacaggactctccctactgcctgagcaaacctgaggcctcccggcagacccacccaccccctggggctgctcagcctcaggcacggacagggcacatgataccaactgctgcccactacggcacgccgcaccggagcacggcaccgagggagccgccacacggtcacctgcaaggacgtcacgggcccctctaaaggattcgtggtgctcatccccaagcttcagagaccctttggggttccacacttcacgtggactgaggtagaccctgcatgaagatgaaattatagggaggacgctccttccctcccctcctagaggagaggaaagggagtcattaacaactagggggttgggtaggattcctaggtatggggaagagttttggaaggggaggaaaatggcaagtgtatttatattgtaaccacatgcaaataaaaagaatgggacctaaactcgtgccgctcgtgccgaattcctgcag

SEQ ID NO: 84 - DNA, 3992 bp, Homo sapiens
  misc_feature: colony stimulating factor 1 receptor, formerly McDonough feline sarcoma viral (v-fms) oncogene homolog /// colony stimulating factor 1 receptor, formerly McDonough feline sarcoma viral (v-fms) oncogene homolog (Homo sapiens)
ggcttcaggaagggcagacagagtgtccaaaagcgtgagagcacgaagtgaggagaaggtggagaagagagaagaggaagaggaagaggaagagaggaagcggagggaactgcggccaggctaaaaggggaagaagaggatcagcccaaggaggaggaagaggaaaacaagacaaacagccagtgcagaggagaggaacgtgtgtccagtgtcccgatccctgcggagctagtagctgagagctctgtgccctgggcaccttgcagccctgcacctgcctgccacttccccaccgaggccatgggcccaggagttctgctgctcctgctggtggccacagcttggcatggtcagggaatcccagtgatagagcccagtgtccccgagctggtcgtgaagccaggagcaacggtgaccttgcgatgtgtgggcaatggcagcgtggaatgggatggccccgcatcacctcactggaccctgtactctgatggctccagcagcatcctcagcaccaacaacgctaccttccaaaacacggggacctatcgctgcactgagcctggagaccccctgggaggcagcgccgccatccacctctatgtcaaagaccctgcccggccctggaacgtgctagcacaggaggtggtcgtgttcgaggaccaggacgcactactgccctgtctgctcacagacccggtgctggaagcaggcgtctcgctggtgcgtgtgcgtggccggcccctcatgcgccacaccaactactccttctcgccctggcatggcttcaccatccacagggccaagttcattcagagccaggactatcaatgcagtgccctgatgggtggcaggaaggtgatgtccatcagcatccggctgaaagtgcagaaagtcatcccagggcccccagccttgacactggtgcctgcagagctggtgcggattcgaggggaggctgcccagatcgtgtgctcagccagcagcgttgatgttaactttgatgtcttcctccaacacaacaacactaagctcgcaatccctcaacaatctgactttcataataaccgttaccaaaaagtcctgaccctcaacctcgatcaagtagatttccaacatgccggcaactactcctgcgtggccagcaacgtgcagggcaagcactccacctccatgttcttccgggtggtagagagtgcctacttgaacttgagctctgagcagaacctcatccaggaggtgaccgtgggggaggggctcaacctcaaagtcatggtggaggcctacccaggcctgcaaggttttaactggacctacctgggacccttttctgaccaccagcctgagcccaagcttgctaatgctaccaccaaggacacatacaggcacaccttcaccctctctctgccccgcctgaagccctctgaggctggccgctactccttcctggccagaaacccaggaggctggagagctctgacgtttgagctcacccttcgataccccccagaggtaagcgtcatatggacattcatcaacggctctggcacccttttgtgtgctgcctctgggtacccccagcccaacgtgacatggctgcagtgcagtggccacactgataggtgtgatgaggcccaagtgctgcaggtctgggatgacccataccctgaggtcctgagccaggagcccttccacaaggtgacggtgcagagcctgctgactgttgagaccttagagcacaaccaaacctacgagtgcagggcccacaacagcgtggggagtggctcctgggccttcatacccatctctgcaggagcccacacgcatcccccggatgagttcctcttcacaccagtggtggtcgcctgcatgtccatcatggccttgctgctgctgctgctcctgctgctattgtacaagtataagcagaagcccaagtaccaggtccgctggaagatcatcgagagctatgagggcaacagttatactttcatcgaccccacgcagctgccttacaacgagaagtgggagttcccccggaacaacctgcagtttggtaagaccctcggagctggagcctttgggaaggtggtggaggccacggcctttggtctgggcaaggaggatgctgtcctgaaggtggctgtgaagatgctgaagtccacggcccatgctgatgagaaggaggccctcatgtccgagctgaagatcatgagccacctgggccagcacgagaacatcgtcaaccttctgggagcctgtacccatggaggccctgtactggtcatcacggagtactgttgctatggcgacctgctcaactttctgcgaaggaaggctgaggccatgctgggacccagcctgagccccggccaggaccccgagggaggcgtcgactataagaacatccacctcgagaagaaatatgtccgcagggacagtggcttctccagccagggtgtggacacctatgtggagatgaggcctgtctccacttcttcaaatgactccttctctgagcaagacctggacaaggaggatggacggcccctggagctccgggacctgcttcacttctccagccaagtagcccagggcatggccttcctcgcttccaagaattgcatccaccgggacgtggcagcgcgtaacgtgctgttgaccaatggtcatgtggccaagattggggacttcgggctggctagggacatcatgaatgactccaactacattgtcaagggcaatgcccgcctgcctgtgaagtggatggccccagagagcatctttgactgtgtctacacggttcagagcgacgtctggtcctatggcatcctcctctgggagatcttctcacttgggctgaatccctaccctggcatcctggtgaacagcaagttctataaactggtgaaggatggataccaaatggcccagcctgcatttgccccaaagaatatatacagcatcatgcaggcctgctgggccttggagcccacccacagacccaccttccagcagatctgctccttccttcaggagcaggcccaagaggacaggagagagcgggactataccaatctgccgagcagcagcagaagcggtggcagcggcagcagcagcagtgagctggaggaggagagctctagtgagcacctgacctgctgcgagcaaggggatatcgcccagcccttgctgcagcccaacaactatcagttctgctgaggagttgacgacagggagtaccactctcccctcctccaaacttcaactcctccatggatggggcgacacggggagaacatacaaactctgccttcggtcatttcactcaacagctcggcccagctctgaaacttgggaaggtgagggattcaggggaggtcagaggatcccacttcctgagcatgggccatcactgccagtcaggggctgggggctgagccctcaccccccgcctcccctactgttctcatggtgttggcctcgtgtttgctatgccaactagtagaaccttctttcctaatccccttatcttcatggaaatggactgactttatgcctatgaagtccccaggagctacactgatactgagaaaaccaggctctttggggctagacagactggcagagagtgagatctccctctctgagaggagcagcagatgctcacagaccacactcagctcaggccccttggagcaggatggctcctctaagaatctcacaggacctcttagtctctgccctatacgccgccttcactccacagcctcacccctcccacccccatactggtactgctgtaatgagccaagtggcagctaaaagttgggggtgttctgcccagtcccgtcattctgggctagaaggcaggggaccttggcattggctggccacaccaagcaggaagcacaaactcccccaagctgactcatcctaactaacagtcacgccgtgggatgtctctgtccacattaaactaacagcattaatgc

SEQ ID NO: 85 - DNA, 1500 bp, Homo sapiens
  misc_feature: inositol(myo)-1(or 4)-monophosphatase 2 (Homo sapiens)
cggagggtggggagcggaaagcaggacgcacggctcccgcggcccgctggctgcccttcccgccagcgcaggtgtgggacgggcggcggactaggcacagagctgcgggagcaggcacagggagtgtggagcctggcggcgggacggcgggatccggtgggagccggagtcccgccgaggggggctggaggtggaggggcccggcgaggccgcgatgaagccgagcggcgaggaccaggcggcgctggcggccggcccctgggaggagtgcttccaggcggccgtgcagctggcgctgcgggcaggacagatcatcagaaaagcccttactgaggaaaaacgtgtctcaacaaaaacatcagctgcagatcttgtgacagaaacagatcaccttgtggaagatttaattatttctgagttgcgagagaggtttccttcacacaggttcattgcagaagaggccgcggcttctggggccaagtgtgtgctcacccacagcccgacgtggatcatcgaccccatcgacggcacctgcaattttgtgcacagattcccgactgtggcggttagcattggatttgctgttcgacaagagcttgaattcggagtgatttaccactgcacagaggagcggctgtacacgggccggcggggtcggggcgccttctgcaatggccagcggctccgggtctccggggagacagatctctcaaaggccttggttctgacagaaattggccccaaacgtgaccctgcgaccctgaagctgttcctgagtaacatggagcggctgctgcatgccaaggcgcatggggtccgagtgattggaagctccacattggcactctgccacctggcctcaggggccgcggatgcctattaccagtttggcctgcactgctgggatctggcggctgccacagtcatcatcagagaagcaggcggcatcgtgatagacacttcgggtggacccctcgacctcatggcttgcagagtggttgcggccagcacccgggagatggcgatgctcatagctcaggccttacagacgattaactatgggcgggatgatgagaagtgactgcggctgaggcaaagctgctcccaaggcctccctgggctgctgtgggctcctggggaggtggccctcgtggcccacgctccatgccagtggctcacgctctgctcctggctaccccagagggagttgtcacgctacagtgagtggctggccttttaaatcgacgtctctctcaccaggatttggtgtttagctgtttctctctttaatctcacgtagcctttttcaggttagtacgtgttcttctgtcagggccaaaactcaaatctcctgtgaaatacgtattgataatccaatcttgatttttccccccagaatataaatctcaggtaataaggctttagaactgctgataaagcggatcgttctcaggccctccccccggagtacttcagaatgcaataaatcaaaataatggc

SEQ ID NO: 86 - DNA, 3791 bp, Homo sapiens
  misc_feature: sperm associated antigen 5 (Homo sapiens)
acagacggcgggtgaacatggcgtcctcgacttggtctgagacgtgataggcctgccttctggttgaagatgtggcgagtgaaaaaactgagcctcagcctgtcgccttcgccccagacgggaaaaccatctatgagaactcctctccgtgaacttaccctgcagcccggtgccctcaccacctctggaaaaagatcccccgcttgctcctcgctgaccccatcactgtgcaagctggggctgcaggaaggcagcaacaactcgtctccagtggattttgtaaataacaagaggacagacttatcttcagaacatttcagtcattcctcaaagtggctagaaacttgtcagcatgaatcagatgagcagcctctagatccaattccccaaattagctctactcctaaaacgtctgaggaagcagtagacccactgggcaattatatggttaaaaccatcgtccttgtaccatctccactggggcagcaacaagacatgatatttgaggcccgtttagataccatggcagagacaaacagcatatctttaaatggacctttgagaacagacgatctggtgagagaggaggtggcaccctgcatgggagacaggttttcagaagttgctgctgtatctgagaaacctatctttcaggaatctccgtcccatctcttagaggagtctccaccaaatccctgttctgaacaactacattgctccaaggaaagcctgagcagtagaactgaggctgtgcgtgaggacttagtaccttctgaaagtaacgccttcttgccttcctctgttctctggctttccccttcaactgccttggcagcagatttccgtgtcaatcatgtggacccagaggaggaaattgtagagcatggagctatggaggaaagagaaatgaggtttcccacacatcctaaggagtctgaaacagaagatcaagcacttgtctcaagtgtggaagatattctgtccacatgcctgacaccaaatctagtagaaatggaatcccaagaagctccaggcccagcagtagaagatgttggtaggattcttggctctgatacagagtcttggatgtccccactggcctggctggaaaaaggtgtaaatacctccgtcatgctggaaaatctccgccaaagcttatcccttccctcgatgcttcgggatgctgcaattggcactacccctttctctacttgctcggtggggacttggtttactccttcagcaccacaggaaaagagtacaaacacatcccagacaggcctggttggcaccaagcacagtacttctgagacagagcagctcctgtgtggccggcctccagatctgactgccttgtctcgacatgacttggaagataacctgctgagctctcttgtcattgtggagtttctctcccgccagcttcgggactggaagagccagctggctgtccctcacccagaaacccaggacagtagcacacagactgacacatctcacagtgggataactaataaacttcagcatcttaaggagagccatgagatgggacaggccctacagcaggccagaaatgtcatgcaatcatgggtgcttatctctaaagagctgatatccttgcttcacctatccctgttgcatttagaagaagataagactactgtgaatcaggagtctcggcgtgcagaaacattggtctgttgctgttttgatttgctgaagaaattgagggcaaagctccagagcctcaaagcagaaagggaggaggcaaggcacagagaggaaatggctctcagaggcaaggatgcggcagagatagtgttggaggctttctgtgcacacgccagccagcgcatcagccagctggaacaggacctagcatccatgcgggaattcagaggccttctgaaggatgcccagacccaactggtagggcttcatgccaagcaagaagagctggttcagcagacagtgagtcttacttctaccttgcaacaagactggaggtccatgcaactggattatacaacatggacagctttgctgagtcggtcccgacaactcacagagaaactcacagtcaagagccagcaagccctgcaggaacgtgatgtggcaattgaggaaaagcaggaggtttctagggtgctggaacaagtctctgcccagttagaggagtgcaaaggccaaacagaacaactggagttggaaaacattcgtctagcaacagatctccgggctcagttgcagattctggccaacatggacagccagctaaaagagctacagagtcagcatacccattgtgcccaggacctggctatgaaggatgagttactctgccagcttacccagagcaatgaggagcaggctgctcaatgcgtaaaggaagagatggcactaaaacacatgcaggcagaactgcagcagcaacaagctgtcctggccaaagaggtgcgggacctgaaagagaccttggagtttgcagaccaggagaatcaggttgctcacctggagctgggtcaggttgagtgtcaattgaaaaccacactggaagtgctccgggagcgcagcttgcagtgtgagaacctcaaggacactgtagagaacctaacggctaaactggccagcaccatagcagataaccaggagcaagatctggagaaaacacggcagtactctcaaaagctagggctgctgactgagcaactacagagcctgactctctttctacagacaaaactaaaggagaagactgaacaagagacccttctgctgagtacagcctgtcctcccacccaggaacaccctctgcctaatgacaggaccttcctgggaagcatcttgacagcagtggcagatgaagagccagaatcaactcctgtgcccttgcttggaagtgacaagagtgctttcacccgagtagcatcaatggtttcccttcagcccgcagagaccccaggcatggaggagagcctggcagaaatgagtattatgactactgagcttcagagtctttgttccctgctacaagagtctaaagaagaagccatcaggactctgcagcgaaaaatttgtgagctgcaagctaggctgcaggcccaggaagaacagcatcaggaagtccagaaggcaaaagaagcagacatagagaagctgaaccaggccttgtgcttgcgctacaagaatgaaaaggagctccaggaagtgatacagcagaatgagaagatcctagaacagatagacaagagtggcgagctcataagccttagagaggaggtgacccaccttacccgctcacttcggcgtgcggagacagagaccaaagtgctccaggaggcctggcaggccagctggactccaactgccagcctatggccaccaattggatccaggagaaagtgtggctctctcaggaggtggacaaactgagagtgatgttcctggagatgaaaaatgagaaggaaaactcctgatcaagttccagagcccatagaaatatcctagaggagaaccttcggcgctctgacaaggagttagaaaaactagatgacattgttcagcatatttataagaccctgctctctattccagaggtggtgaggggatgcaaagaactacagggattgctggaatttctgagctaagaaactgaaagccagaatttgtttcacctctttttacctgcaatacccccttaccccaataccaagaccaactggcatagagccaactgagataaatgctatttaaataaagtgtatttaatgaaaaaaaaaaaaaaaaaaaaa

SEQ ID NO: 87 - DNA, 1075 bp, Homo sapiens; identical to SEQ ID NO: 7
  misc_feature: tissue inhibitor of metalloproteinase 2(Homo sapiens)

SEQ ID NO: 88 - DNA, 1967 bp, Homo sapiens
  misc_feature: cell division cycle 2, G1 to S and G2 to M(Homo sapiens)
  misc_feature (1289)..(1289): n is a, c, g, or t
  misc_feature (1766)..(1766): n is a, c, g, or t
  misc_feature (1915)..(1915): n is a, c, g, or t
  misc_feature (1917)..(1920): n is a, c, g, or t
ggggggggggggcacttggcttcaaagctggctcttggaaattgagcggagagcgacgcggcttgttgtagctgccgctgcggccgccgcggaataataagccgggatctaccatacccattgactaactatggaagattataccaaaatagagaaaattggagaaggtacctatggagttgtgtataagggtagacacaaaactacaggtcaagtggtagccatgaaaaaaatcagactagaaagtgaagaggaaggggttcctagtactgcaattcgggaaatttctctattaaaggaacttcgtcatccaaatatagtcagtcttcaggatgtgcttatgcaggattccaggttatatctcatctttgagtttctttccatggatctgaagaaatacttggattctatccctcctggtcagtacatggattcttcacttgttaagagttatttataccaaatcctacaggggattgtgttttgtcactctagaagagttcttcacagagacttaaaacctcaaaatctcttgattgatgacaaaggaacaattaaactggctgattttggccttgccagagcttttggaatacctatcagagtatatacacatgaggtagtaacactctggtacagatctccagaagtattgctggggtcagctcgttactcaactccagttgacatttggagtataggcaccatatttgctgaactagcaactaagaaaccacttttccatggggattcagaaattgatcaactcttcaggattttcagagctttgggcactcccaataatgaagtgtggccagaagtggaatctttacaggactataagaatacatttcccaaatggaaaccaggaagcctagcatcccatgtcaaaaacttggatgaaaatggcttggatttgctctcgaaaatgttaatctatgatccagccaaacgaatttctggcaaaatggcactgaatcatccatattttaatgatttggacaatcagattaagaagatgtagctttctgacaaaaagtttccatatgttatgtcaacagatagttgtgtttttattgttaactcttgtctatttttgtcttatatatatttctttgttatcaaacttcagctgtacttcgtcttctaatttcaaaaatataacttaaaaatgtaaatattctatatgaatttaaatataattctgtaaatgtgtgtaggtctcactgtaacaactatttgttactataataaaactataatattgatgtcaggaatcaggaaaaaantttgagttggcttaaatcatctcagtccttatggcagttttattttcctgtagttggaactactaaaatttaggaaaatgctaagttcaagtttcgtaatgctttgaagtatttttatgctctgaatgtttaaatgttctcatcagtttcttgccatgttgttaactatacaacctggctaaagatgaatatttttctactggtattttaatttttgacctaaatgtttaagcattcggaatgagaaaactatacagatttgagaaatgatgctaaatttataggagttttcagtaacttaaaaagctaacatgagagcatgccaaaatttgctaagtcttacaaagatcaagggctgtccgcaacagggaagaacagttttgaaaatttatgaactatcttatttttaggtaggttttgaaagctttttgtctaagtgaattcttatgccttggtcagagtaataactgaaggagntgcttatcttggctttcgagtctgagtttaaaactacacattttgacatagtgtttattagcagccatctaaaaaggctctaatgtatatttaactaaaattactagctttgggaattaaactgtttaacaaataaaaaaaaaaaaaanannnntacctataagcagcctaatttgaattatttgctccatctacatagtg

SEQ ID NO: 89 - DNA, 10660 bp, Homo sapiens
  misc_feature: ataxin 1     (Homo sapiens)
ctactacagtggcggacgtacaggacctgtttcactgcagggggatccaaaacaagccccgtggagcaacagccagagcaacagcagctgcaagacattgtttctctccctctgcccccccttccccacgcaaccccagatccatttacactttacagttttacctcacaaaaactactacaagcaccaagctccctgatggaaaggagcatcgtgcatcaagtcaccagggtggtccattcaagctgcagatttgtttgtcatccttgtacagcaatctcctcctccactgccactacagggaagtgcatcacatgtcagcatactggagcatagtgaaagagtctattttgaagcttcaaacttagtgctgctgcagaccaggaacaagagagaaagagtggatttcagcctgcacggatggtcttgaaacacaaatggtttttggtctaggcgttttacactgagattctccactgccaccctttctactcaagcaaaatcttcgtgaaaagatctgctgcaaggaactgatagcttatggttctccattgtgatgaaagcacatggtacagttttccaaagaaattagaccattttcttcgtgagaaagaaatcgacgtgctgttttcatagggtatttctcacttctctgtgaaaggaagaaagaacacgcctgagcccaagagccctcaggagccctccagagcctgtgggaagtctccatggtgaagtataggctgaggctacctgtgaacagtacgcagtgaatgttcatccagagctgctgttggcggattgtacccacggggagatgattcctcatgaagagcctggatcccctacagaaatcaaatgtgactttccgtttatcagactaaaatcagagccatccagacagtgaaacagtcaccgtggaggggggacggcgaaaaatgaaatccaaccaagagcggagcaacgaatgcctgcctcccaagaagcgcgagatccccgccaccagccggtcctccgaggagaaggcccctaccctgcccagcgacaaccaccgggtggagggcacagcatggctcccgggcaaccctggtggccggggccacgggggcgggaggcatgggccggcagggacctcggtggagcttggtttacaacagggaataggtttacacaaagcattgtccacagggctggactactccccgcccagcgctcccaggtctgtccccgtggccaccacgctgcctgccgcgtacgccaccccgcagccagggaccccggtgtcccccgtgcagtacgctcacctgccgcacaccttccagttcattgggtcctcccaatacagtggaacctatgccagcttcatcccatcacagctgatccccccaaccgccaaccccgtcaccagtgcagtggcctcggccgcaggggccaccactccatcccagcgctcccagctggaggcctattccactctgctggccaacatgggcagtctgagccagacgccgggacacaaggctgagcagcagcagcagcagcagcagcagcagcagcagcagcatcagcatcagcagcagcagcagcagcagcagcagcagcagcagcagcagcagcacctcagcagggctccggggctcatcaccccggggtcccccccaccagcccagcagaaccagtacgtccacatttccagttctccgcagaacaccggccgcaccgcctctcctccggccatccccgtccacctccacccccaccagacgatgatcccacacacgctcaccctggggcccccctcccaggtcgtcatgcaatacgccgactccggcagccactttgtccctcgggaggccaccaagaaagctgagagcagccggctgcagcaggccatccaggccaaggaggtcctgaacggtgagatggagaagagccggcggtacggggccccgtcctcagccgacctgggcctgggcaaggcaggcggcaagtcggttcctcacccgtacgagtccaggcacgtggtggtccacccgagcccctcagactacagcagtcgtgatccttcgggggtccgggcctctgtgatggtcctgcccaacagcaacacgcccgcagctgacctggaggtgcaacaggccactcatcgtgaagcctccccttctaccctcaacgacaaaagtggcctgcatttagggaagcctggccaccggtcctacgcgctctcaccccacacggtcattcagaccacacacagtgcttcagagccactcccggtgggactgccagccacggccttctacgcagggactcaaccccctgtcatcggctacctgagcggccagcagcaagcaatcacctacgccggcagcctgccccagcacctggtgatccccggcacacagcccctgctcatcccggtcggcagcactgacatggaagcgtcgggggcagccccggccatagtcacgtcatccccccagtttgctgcagtgcctcacacgttcgtcaccaccgcccttcccaagagcgagaacttcaaccctgaggccctggtcacccaggccgcctacccagccatggtgcaggcccagatccacctgcctgtggtgcagtccgtggcctccccggcggcggctccccctacgctgcctccctacttcatgaaaggctccatcatccagttggccaacggggagctaaagaaggtggaagacttaaaaacagaagatttcatccagagtgcagagataagcaacgacctgaagatcgactccagcaccgtagagaggattgaagacagccatagcccgggcgtggccgtgatacagttcgccgtcggggagcaccgagcccaggtcagcgttgaagttttggtagagtatcctttttttgtgtttggacagggctggtcatcctgctgtccggagagaaccagccagctctttgatttgccgtgttccaaactctcagttggggatgtctgcatctcgcttaccctcaagaacctgaagaacggctctgttaaaaagggccagcccgtggatcccgccagcgtcctgctgaagcactcaaaggccgacggcctggcgggcagcagacacaggtatgccgagcaggaaaacggaatcaaccaggggagtgcccagatgctctctgagaatggcgaactgaagtttccagagaaaatgggattgcctgcagcgcccttcctcaccaaaatagaacccagcaagcccgcggcaacgaggaagaggaggtggtcggcgccagagagccgcaaactggagaagtcagaagacgaaccacctttgactcttcctaagccttctctaattcctcaggaggttaagatttgcattgaaggccggtctaatgtaggcaagtagaggcagcgtgggggaaaggaaacgtggctctcccttatcatttgtatccagattactgtactgtaggctaaaataacacagtatttacatgttatcttcttaattttaggtttctgttctaaccttgtcattagagttacagcaggtgtgtcgcaggagactggtgcatatgctttttccacgagtgtctgtcagtgagcgggcgggaggaagggcacagcaggagcggtcagggctccaggcatccccggggaagaaaggaacggggcttcacagtgcctgccttctctagcggcacagaagcagccgggggcgctgactcccgctagtgtcaggagaaaagtcccgtgggaagagtcctgcaggggtgcagggttgcacgcatgtgggggtgcacaggcgctgtggcggcgagtgagggtctctttttctctgcctccctctgcctcactctcttgctatcggcatgggccgggggggttcagagcagtgtcctcctggggttcccacgtgcaaaatcaacatcaggaacccagcttcagggcatcgcggagacgcgtcagatggcagatttggaaagttaaccatttaaaagaacatttttctctccaacatattttacaataaaagcaacttttaattgtatagatatatatttccccctatggggcctgactgcactgatatatattttttttaaagagcaactgccacatgcgggatttcatttctgctttttactagtgcagcgatgtcaccagggtgttgtggtggacagggaagcccctgctgtcatggccccacatggggtaaggggggttgggggtgggggagagggagagagcgaacacccacgctggtttctgtgcagtgttaggaaaaccaatcaggttattgcattgacttcactcccaagaggtagatgcaaactgcccttcagtgagagcaacagaagctcttcacgttgagtttgcgaaatctttttgtctttgaactctagtactgtttatagttcatgactatggacaactcgggtgccacttttttttttttcagattccagtgtgacatgaggaattagattttgaagatgagcatatattactatctttaagcatttaaaaatactgttcacactttattaccaagcatcttggtctctcattcaacaagtactgtatctcactttaaactctttggggaaaaaacaaaaacaaaaaaaactaagttgctttctttttttcaacactgtaactacatttcagctctgcagaattgctgaagagcaagatattgaaagtttcaatgtggtttaaagggatgaatgtgaattatgaactagtatgtgacaataaatgaccaccaagtactacctgacgggaggcacttttcactttgatgtctgagaatcagttcaaggcatatgcagagttggcagagaaactgagagaaaagggatggagaagagaatactcatttttgtccagtgtttttctttttaagatgaacttttaaagaaccttgcgatttgcacatattgagtttataacttgtgtgatattcctgcagtttttatccaataacattgtgggaaaggtttgggggactgaacgagcataaataaatgtagcaaaatttctttctaacctgcctaaactctaggccattttataaggttatgttcctttgaaaattcattttggtctttttaccacatctgtcacaaaaagccaggtcttagcgggctcttagaaactctgagaattttcttcagattcattgagagagttttccataaagacatttatatatgtgagcaagattttttttaaacaattactttattattgttgttattaatgttattttcagaatggctttttttttctattcaaaatcaaatcgagatttaatgtttggtacaaacccagaaagggtatttcatagtttttaaacctttcattcccagagatccgaaatatcatttgtgggttttgaatgcatctttaaagtgctttaaaaaaaagttttataagtagggagaaatttttaaatattcttacttggatggctgcaactaaactgaacaaatacctgacttttcttttaccccattgaaaatagtactttcttcgtttcacaaattaaaaaaaaaatctggtatcaacccacattttggctgtctagtattcatttacatttagggttcaccaggactaatgatttttataaaccgttttctggggtgtaccaaaaacatttgaataggtttagaatagctagaatagttccttgactttcctcgaatttcattaccctctcagcatgcttgcagagagctgggtgggctcattcttgcagtcatactgcttatttagtgctgtattttttaaacgtttctgttcagagaacttgcttaatcttccatatattctgctcagggcacttgcaattattaggttttgtttttctttttgttttttagcctttgatggtaagaggaatacgggctgccacatagactttgttctcattaatatcactatttacaactcatgtggactcagaaaaacacacaccaccttttggcttacttcgagtattgaattgactggatccactaaaccaacactaagatgggaaaacacacatggtttggagcaataggaacatcatcataatttttgtggttctatttcaggtataggaattataaaataattggttctttctaaacacttgtcccatttcattctcttgcttttttagcatgtgcaatactttctgtgccaatagagtctgaccagtgtgctatatagttaaagctcattcccttttggctttttccttgtttggttgatcttccccattctggccagagcagggctggagggaaggagccaggagggagagagcctcccacctttcccctgctgcggatgctgagtgctggggcggggagccttcaggagccccgtgcgtctgccgccacgttgcagaaagagccagccaaggagacccgggggaggaaccgcagtgtcccctgtcaccacacggaatagtgaatgtggagtgtggagaggaaggaggcagattcatttctaagacgcactctggagccatgtagcctggagtcaacccattttccacggtcttttctgcaagtgggcaggcccctcctcggggtctgtgtccttgagacttggagccctgcctctgagcctggacgggaagtgtggcctgttgtgtgtgtgcgttctgagcgtgttggccagtggctgtggaggggaccacctgccacccacggtcaccactcccttgtggcagctttctcttcaaataggaagaacgcacagagggcaggagcctcctgtttgcagacgttggcgggccccgaggctcccagagcagcctctgtcaccgcttctgtgtagcaaacattaacgatgacaggggtagaaattcttcggtgccgttcagcttacaaggatcagccatgtgcctctgtactatgtccactttgcaatatttaccgacagccgtcttttgttctttctttcctgttttccatttttaaactagtaacagcaggccttttgcgtttacaatggaacacaatcaccaagaaattagtcagggcgaaaagaaaaaaataatactattaataagaaaccaacaaacaagaacctctctttctagggatttctaaatatataaaatgactgttccttagaatgtttaacttaagaattatttcagtttgtctgggccacactggggcagaggggggagggagggatacagagatggatgccacttacctcagatcttttaaagtggaaatccaaattgaattttcatttggactttcaggataattttctatgttggtcaacttttcgttttccctaactcacccagtttagtttgggatgatttgatttctgttgttgttgatcccatttctaacttggaattgtgagcctctatgttttctgttaggtgagtgtgttgggttttttccccccaccaggaagtggcagcatccctccttctcccctaaagggactctgcggaacctttcacacctctttctcagggacggggcaggtgtgtgtgtggtacactgacgtgtccagaagcagcactttgactgctctggagtagggttgtacaatttcaaggaatgtttggatttcctgcatcttgtggattactccttagataccgcatagattgcaatataatgctgcatgttcaagatgaacagtagctcctagtaatcataaaatccactctttgcacagtttgatctttactgaaatatgttgccaaaatttatttttgttgttgtagctctggattttgttttgttttgttttttaaggaaacgattgacaataccctttaacatctgtgactactaaggaaacctatttctttcatagagagaaaaatctccaatgcttttgaagacactaataccgtgctatttcagatatgggtgaggaagcagagctctcggtaccgaaggccgggcttcttgagctgtgttggttgtcatggctactgtttcatgaaccacaagcagctcaacagactggtctgttgccttctgaaaccctttgcacttcaatttgcaccaggtgaaaacagggccagcagactccatggcccaattcggtttcttcggtggtgatgtgaaaggagagaattacactttttttttttttaagtggcgtggaggcctttgcttccacatttgtttttaacccagaatttctgaaatagagaatttaagaacacatcaagtaataaatatacagagaatatacttttttataaagcacatgcatctgctattgtgttgggttggtttcctctcttttccacggacagtgttgtgtttctggcatagggaaactccaaacaacttgcacacctctactccggagctgagatttcttttacatagatgacctcgcttcaaatacgttaccttactgatgataggatcttttcttgtagcactataccttgtgggaatttttttttaaatgtacacctgatttgagaagctgaagaaaacaaaattttgaagcactcactttgaggagtacaggtaatgttttaaaaaattgcacaaaagaaaaatgaatgtcgaaatgattcattcagtgtttgaaagatatggctctgttgaaacaatgagtttcatactttgtttgtaaaaaaaaaaagcagagaagggttgaaagttacatgtttttttgtatatagaaatttgtcatgtctaaatgatcagatttgtatggttatggcctggaagaattactacgtaaaaggctcttaaactatacctatgcttattgttatttttgttacatatagccctcgtctgagggaggggaactcggtattctgcgatttgagaatactgttcattcctatgctgaaagtacttctctgagctcccttcttagtctaaactcttaagccattgcaacttctttttcttcagagatgatgtttgacattttcagcacttcctgttcctataaacccaaagaatataatcttgaacacgaagtgtttgtaacaagggatccaggctaccaatcaaacaggactcattatggggacaaaaaaaaaaaaaattatttcaccttctttccccccacacctcatttaaatggggggagtaaaaacatgatttcaatgtaaatgcctcattttattttagttttattttgatttttatttaatataaagaggccagaataaatacggagcatcttctcagaatagtattcctgtccaaaaatcaagccggacagtggaaactggacagctgtggggatattaagcacccccacttacaattcttaaattcagaatctcgtcccctcccttctcgttgaaggcaactgttctggtagctaactttctcctgtgtaatggcgggagggaacaccggcttcagtttttcatgtccccatgacttgcatacaaatggttcaactgtattaaaattaagtgcatttggccaataggtagtatctatacaataacaacaatctctaagaatttccataacttttcttatctgaaaggactcaagtcttccactgcagatacattggaggcttcacccacgttttctttccctttagtttgtttgctgtctggatggccaatgagcctgtctccttttctgtggccaatctgaaggccttcgttggaagtgttgttcacagtaatccttaccaagataacatactgtcctccagaataccaagtattaggtgacactagctcaagctgttgtcttcagagcagttaccaagaagctcggtgcacaggttttctctggttcttacaggaaccacctactctttcagttttctggcccaggagtggggtaaatcctttagttagtgcatttgaacttggtacctgtgcattcagttctgtgaatactgccctttttggcggggtttcctcatctccccagcctgaactgctcaactctaaacccaaattagtgtcagccgaaaggaggtttcaagatagtcctgtcagtatttgtggtgaccttcagattagacagtcttcatttccagccagtggagtcctggctccagagccatctctgagactccgtactactggatgttttaatatcagatcattacccaccatatgcctcccacaggccaagggaaaacagacaccagaacttgggttgagggcactaccagactgacatggccagtacagaggagaactagggaaggaatgatgttttgcaccttattgaaaagaaaattttaagtgcatacataatagttaagagcttttattgtgacaggagaacttttttccatatgcgtgcatactctctgtaattccagtgtaaaatattgtacttgcactagcttttttaaacaaatattaaaaaatggaagaattcatattctattttctaatcgtggtgtgtctatttgtaggatacactcgagtctgtttattgaattttatggtccctttctttgatggtgcttgcaggttttctaggtagaaattatttcattattataataaaacaatgtttgattcaaaatttgaacaaaattgttttaaataaattgtctgtataccagtacaagtttattgtttcagtatactcgtactaataaaataacagtgccaattgcaaaaaaaaaaaaaaaaaaaaaaaaaaaaaaaaaaaaaaaaaaaaaaaaaaaaaaaaa

SEQ ID NO: 90 - DNA, 3171 bp, Homo sapiens
  misc_feature: cadherin 3, type 1, P-cadherin (placental) (Homo sapiens)
gcggaacaccggcccgccgtcgcggcagctgcttcacccctctctctgcagccatggggctccctcgtggacctctcgcgtctctcctccttctccaggtttgctggctgcagtgcgcggcctccgagccgtgccgggcggtcttcagggaggctgaagtgaccttggaggcgggaggcgcggagcaggagcccggccaggcgctggggaaagtattcatgggctgccctgggcaagagccagctctgtttagcactgataatgatgacttcactgtgcggaatggcgagacagtccaggaaagaaggtcactgaaggaaaggaatccattgaagatcttcccatccaaacgtatcttacgaagacacaagagagattgggtggttgctccaatatctgtccctgaaaatggcaagggtcccttcccccagagactgaatcagctcaagtctaataaagatagagacaccaagattttctacagcatcacggggccgggggcagacagcccccctgagggtgtcttcgctgtagagaaggagacaggctggttgttgttgaataagccactggaccgggaggagattgccaagtatgagctctttggccacgctgtgtcagagaatggtgcctcagtggaggaccccatgaacatctccatcatcgtgaccgaccagaatgaccacaagcccaagtttacccaggacaccttccgagggagtgtcttagagggagtcctaccaggtacttctgtgatgcaggtgacagccacagatgaggatgatgccatctacacctacaatggggtggttgcttactccatccatagccaagaaccaaaggacccacacgacctcatgttcacaattcaccggagcacaggcaccatcagcgtcatctccagtggcctggaccgggaaaaagtccctgagtacacactgaccatccaggccacagacatggatggggacggctccaccaccacggcagtggcagtagtggagatccttgatgccaatgacaatgctcccatgtttgacccccagaagtacgaggcccatgtgcctgagaatgcagtgggccatgaggtgcagaggctgacggtcactgatctggacgcccccaactcaccagcgtggcgtgccacctaccttatcatgggcggtgacgacggggaccattttaccatcaccacccaccctgagagcaaccagggcatcctgacaaccaggaagggtttggattttgaggccaaaaaccagcacaccctgtacgttgaagtgaccaacgaggccccttttgtgctgaagctcccaacctccacagccaccatagtggtccacgtggaggatgtgaatgaggcacctgtgtttgtcccaccctccaaagtcgttgaggtccaggagggcatccccactggggagcctgtgtgtgtctacactgcagaagaccctgacaaggagaatcaaaagatcagctaccgcatcctgagagacccagcagggtggctagccatggacccagacagtgggcaggtcacagctgtgggcaccctcgaccgtgaggatgagcagtttgtgaggaacaacatctatgaagtcatggtcttggccatggacaatggaagccctcccaccactggcacgggaacccttctgctaacactgattgatgtcaacgaccatggcccagtccctgagccccgtcagatcaccatctgcaaccaaagccctgtgcgccacgtgctgaacatcacggacaaggacctgtctccccacacctcccctttccaggcccagctcacagatgactcagacatctactggacggcagaggtcaacgaggaaggtgacacagtggtcttgtccctgaagaagttcctgaagcaggatacatatgacgtgcacctttctctgtctgaccatggcaacaaagagcagctgacggtgatcagggccactgtgtgcgactgccatggccatgtcgaaacctgccctggaccctggaaaggaggtttcatcctccctgtgctgggggctgtcctggctctgctgttcctcctgctggtgctgcttttgttggtgagaaagaagcggaagatcaaggagcccctcctactcccagaagatgacacccgtgacaacgtcttctactatggcgaagaggggggtggcgaagaggaccaggactatgacatcacccagctccaccgaggtctggaggccaggccggaggtggttctccgcaatgacgtggcaccaaccatcatcccgacacccatgtaccgtcctaggccagccaacccagatgaaatcggcaactttataattgagaacctgaaggcggctaacacagaccccacagccccgccctacgacaccctcttggtgttcgactatgagggcagcggctccgacgccgcgtccctgagctccctcacctcctccgcctccgaccaagaccaagattacgattatctgaacgagtggggcagccgcttcaagaagctggcagacatgtacggtggcggggaggacgactaggcggcctgcctgcagggctggggaccaaacgtcaggccacagagcatctccaaggggtctcagttcccccttcagctgaggacttcggagcttgtcaggaagtggccgtagcaacttggcggagacaggctatgagtctgacgttagagtggttgcttccttagcctttcaggatggaggaatgtgggcagtttgacttcagcactgaaaacctctccacctgggccagggttgcctcagaggccaagtttccagaagcctcttacctgccgtaaaatgctcaaccctgtgtcctgggcctgggcctgctgtgactgacctacagtggactttctctctggaatggaaccttcttaggcctcctggtgcaacttaatttttttttttaatgctatcttcaaaacgttagagaaagttcttcaaaagtgcagcccagagctgctgggcccactggccgtcctgcatttctggtttccagaccccaatgcctcccattcggatggatctctgcgtttttatactgagtgtgcctaggttgccccttattttttattttccctgttgcgttgctatagatgaagggtgaggacaatcgtgtatatgtactagaacttttttattaaagaaa

SEQ ID NO: 91 - DNA, 1000 bp, Homo sapiens
  misc_feature: deoxythymidylate kinase (thymidylate kinase) (Homo sapiens)
aattcgccagcggcgcggtggacagtcatggcggcccggcgcggggctctcatagtgctggagggcgtggaccgcgccgggaagagcacgcagagccgcaagctggtggaagcgctgtcgcgcgggccaccgcccgaactgctccggttcccggaaagatcaactgaaatcggcaaacttctgagttcctacttgcaaaagaaaagtgacgtggaggatcactcggtgcacctgcttttttctgcaaatcgctgggaacaagtgccgttaattaaggaaaagttgagccagggcgtgaccctcgtcgtggacagatacgcattttctggtgtggccttcaccggtgccaaggagaatttttccctagactggtgtaaacagccagacgtgggccttcccaaacccgacctggtcctgttcctccagttacagctggcggatgctgccaagcggggagcgtttggccatgagcgctatgagaacggggctttccaggagcgggcgctccggtgtttccaccagctcatgaaagacacgactttgaactggaagatggtggatgcttccaaaagactcgaagctgtccatgaggaactccgcgtgctctctgaggacgccatccgcactgccacagagaagccgctgggggagctatggaagtgacccaaggctgcccactggagacgcctctccctgcagtcccccgagaggtgggagactcgcggaaggccccgtccccagcggagtccagaccccacaacttcaggagctctttcccggcagcagagatctgcaggctgcctcttctgccccggagctggggtgcactggggacccccgtggtggggaccttggcagtgtggacatgagcagagcgatggagcagtctcctgccctctcccctgtcctgatggcactctgttgtattttcttactgaagttcagtgataactctgagcagtttcattgtgatcactgtaaatggtaatcagttggaatt

SEQ ID NO: 92 - DNA, 1390 bp, Homo sapiens
  misc_feature: MAD2 mitotic arrest deficient-like 1 (yeast) (Homo sapiens)
gggaagtgctgttggagccgctgtggttgctgtccgcggagtggaagcgcgtgcttttgtttgtgtccctggccatggcgctgcagctctcccgggagcagggaatcaccctgcgcgggagcgccgaaatcgtggccgagttcttctcattcggcatcaacagcattttatatcagcgtggcatatatccatctgaaacctttactcgagtgcagaaatacggactcaccttgcttgtaactactgatcttgagctcataaaatacctaaataatgtggtggaacaactgaaagattggttatacaagtgttcagttcagaaactggttgtagttatctcaaatattgaaagtggtgaggtcctggaaagatggcagtttgatattgagtgtgacaagactgcaaaagatgacagtgcacccagagaaaagtctcagaaagctatccaggatgaaatccgttcagtgatcagacagatcacagctacggtgacatttctgccactgttggaagtttcttgttcatttgatctgctgatttatacagacaaagatttggttgtacctgaaaaatgggaagagtcgggaccacagtttattaccaattctgaggaagtccgccttcgttcatttactactacaatccacaaagtaaatagcatggtggcctacaaaattcctgtcaatgactgaggatgacatgaggaaaataatgtaattgtaattttgaaatgtggttttcctgaaatcaggtcatctatagttgatatgttttatttcattggttaatttttacatggagaaaaccaaaatgatacttactgaactgtgtgtaattgttcctttatttttttggtacctatttgacttaccatggagttaacatcatgaatttattgcacattgttcaaaaggaaccaggaggtttttttgtcaacattgtgatgtatattcctttgaagatagtaactgtagatggaaaaacttgtgctataaagctagatgctttcctaaatcagatgttttggtcaagtagtttgactcagtataggtagggagatatttaagtataaaatacaacaaaggaagtctaaatattcagaatctttgttaaggtcctgaaagtaactcataatctataaacaatgaaatattgctgtatagctccttttgaccttcatttcatgtatagttttccctattgaatcagtttccaattatttgactttaatttatgtaacttgaacctatgaagcaatggatatttgtactgtttaatgttctgtgatacagaactcttaaaaatgttttttcatgtgttttataaaatcaagttttaagtgaaagtgaggaaataaagttaagtttgttttaaaaaaaaaaaaaaaaaa

SEQ ID NO: 93 - DNA, 1649 bp, Homo sapiens
  misc_feature: cyclin A2 (Homo sapiens)
cggcagccagcctattctttggccgggtcggtgcgagtggtcggctgggcagagtgcacgctgcttggcgccgcaggtgatcccgccgtccactcccgggagcagtgatgttgggcaactctgcgccggggcctgcgacccgcgaggcgggctcggcgctgctagcattgcagcagacggcgctccaagaggaccaggagaatatcaacccggaaaaggcagcgcccgtccaacaaccgcggacccgggccgcgctggcggtactgaagtccgggaacccgcggggtctagcgcagcagcagaggccgaagacgagacgggttgcaccccttaaggatcttcctgtaaatgatgagcatgtcaccgttcctccttggaaagcaaacagtaaacagcctgcgttcaccattcatgtggatgaagcagaaaaagaagctcagaagaagccagctgaatctcaaaaaatagagcgtgaagatgccctggcttttaattcagccattagtttacctggacccagaaaaccattggtccctcttgattatccaatggatggtagttttgagtcaccacatactatggacatgtcaattgtattagaagatgaaaagccagtgagtgttaatgaagtaccagactaccatgaggatattcacacataccttagggaaatggaggttaaatgtaaacctaaagtgggttacatgaagaaacagccagacatcactaacagtatgagagctatcctcgtggactggttagttgaagtaggagaagaatataaactacagaatgagaccctgcatttggctgtgaactacattgataggttcctgtcttccatgtcagtgctgagaggaaaacttcagcttgtgggcactgctgctatgctgttagcctcaaagtttgaagaaatataccccccagaagtagcagagtttgtgtacattacagatgatacctacaccaagaaacaagttctgagaatggagcatctagttttgaaagtccttacttttgacttagctgctccaacagtaaatcagtttcttacccaatactttctgcatcagcagcctgcaaactgcaaagttgaaagtttagcaatgtttttgggagaattaagtttgatagatgctgacccatacctcaagtatttgccatcagttattgctggagctgcctttcatttagcactctacacagtcacgggacaaagctggcctgaatcattaatacgaaagactggatataccctggaaagtcttaagccttgtctcatggaccttcaccagacctacctcaaagcaccacagcatgcacaacagtcaataagagaaaagtacaaaaattcaaagtatcatggtgtttctctcctcaacccaccagagacactaaatctgtaacaatgaaagactgcctttgttttctaagatgtaaatcactcaaagtatatggtgtacagtttttaacttaggtttttaattttacaatcatttctgaatacagaagttgtggccaagtacaaattatggtatctattactttttaaatggttttaatttgtatatcttttgtatatgtatctgtcttagatatttggctaattttaagtggttttgttaaagtattaatgatgccagctgccg

SEQ ID NO: 94 - DNA, 3202 bp, Homo sapiens
  misc_feature: reticulon 1 (Homo sapiens)
ctgagacaccgcagcttccctgagcgccgagtccctccggggacagcagcagggagcgcccgcgcagccaccgagcctctgcccagccaagccgccgtcgccgcgccgggggaccgccagccatggccgcgccgggggatccgcaggacgagctgctgccgctggccggccccgggtcccagtggctcaggcaccgaggggagggggagaacgaagcggtgacgccgaaaggggccacgccggcgccgcaggctggggagcccagcccggggttgggcgccagggcccgggaagcggcgtcgcgggaagccggctcgggccccgcccggcagtcgcccgttgccatggaaactgcatccacaggtgtggcaggtgtttccagtgccatggaccacaccttctcaacaacatcaaaagatggggaaggatcgtgttacacatctctcatttctgacatctgctatccacctcaggaggattctacatattttactggaattcttcagaaggaaaatggccacgtcaccatttcagagagccctgaggagctgggtacacccggcccctccttaccagatgtgcctgggatagagtctcgtggcttatttagttctgattctggaatagagatgactcctgcagagtccacggaagtgaacaagatcttagcagaccctctggaccagatgaaagcagaggcctataaatacattgacataaccagacccgaggaggtgaagcaccaagaacaacatcaccccgagctggaagataaagacttggactttaagaataaagacactgacatctcaattaaacctgaaggagtccgtgaacctgacaaaccagctcctgtggagggaaaaatcatcaaggaccatttattggaagaatccacatttgctccatacatagatgatctctctgaagaacagcgcagggctcctcagatcaccacccctgtcaaaatcacactgacggaaatagaaccttctgttgaaaccactacccaagagaagacccctgagaagcaagatatatgtctaaagccaagtcctgacacagtccccactgtcactgtctcggagcctgaagacgacagcccaggatctatcacccctccatcttctggaacagaaccatctgctgcagaatcccaggggaaaggcagcatctccgaggatgagctgatcaccgccatcaaagaagcaaagggattatcgtatgaaaccgccgagaacccacggccggtgggccagctggccgacaggcccgaggtcaaggccaggtccggaccgccaaccatccccagccccctggaccacgaggccagcagcgcggagtcgggggactcagagatcgagctggtgtccgaggaccccatggccgcggaggacgcgctgccctcaggctatgtgagctttggccacgtgggcggcccgccgccctcgcccgcctcgccatccatccagtacagcatcctgagggaggagcgcgaggccgagctggacagcgagctcatcatcgagtcgtgcgacgcctcctcggcctcggaggagagccccaagcgggagcaggactcacccccgatgaagcccagcgccctggatgccatccgggaggagactggcgtccgggccgaggagcgtgcgccaagccggcggggcctggccgagccgggttccttcctcgactacccctcaactgagccccagcctggccccgagctgccccctggagacggagccctggagcctgagacgcccatgttgccacggaagcctgaagaagactcgagttccaaccaaagtcctgcggccacaaagggccctgggcctctaggtcctggcgccccgcccccactgctgtttctcaataagcaaaaagctattgacctgttgtattggcgggacatcaagcagacgggcatcgtgtttgggagtttcctgctgctgctcttctccctgacccagttcagcgtggtgagcgtcgtggcctacctggccctggccgcactctcagccaccatcagtttccgcatctacaagtctgttttacaagcagtgcagaaaaccgacgaaggccaccctttcaaggcctacttggagcttgagatcaccctttctcaggagcagattcagaagtacacggactgcctgcagttctacgtgaacagcacacttaaggaactgaggaggctcttccttgtccaggacctggtggattccttaaaatttgcagtcctgatgtggctcctgacctacgttggcgctctcttcaatggcctgaccctgctgctcatggctgtggtttcaatgtttactctacctgtagtgtatgttaagcaccaggcacagattgaccaatatctgggacttgtgaggactcacataaatgctgttgtggcaaagattcaggctaaaatcccaggcgctaagaggcacgctgagtaaactgatttcccaccggggactggacacaaacaggaatgtctggagtggtaacagctctcttcttactcattactgcaaattgattgtctttcccccctccctccagtaccataatcttagagacaaaccttaaaacagctgtttttaggctgttccttgtactcttaggatatttgagtcacttgtgtcaaccactaaagtatagagaaaagtgtattagatgtggtttttaattttgtgttgctaaaaaaagtgcatgatggtgagagcccaagttatctttccctcttcggtgttcttcttctcttctctgcaatgcttctgtagcttctaatgttccccgtggctaggcctttcctgccgagtgctctgatgcaatagtggaaatcgcttatatgtccttgggttgctggttggattaatctttaataacaatatatagaattgtagactgatgttttagcatttttccaacacacacaacgtaaaaataaaagcagtcgaccgcacttatggtaatcagttttgtataacttaaaataattaaataaatgaataaatccaaaacaaacatgcagtacttttgttgtatgggattggtgggctgatttacatgtatggttactaaaaagtaccagcatgttaactttattacaatttgtattactttctctgtagttcctaatggattcaattacggactctggatatttgcacttatgtacttgatactgaatgcataaataaat

SEQ ID NO: 95 - DNA, 576 bp, Homo sapiens
  misc_feature: S100 calcium binding protein A9 (calgranulin B) (Homo sapiens)
aaacactctgtgtggctcctcggctttgggacagagtgcaagacgatgacttgcaaaatgtcgcagctggaacgcaacatagagaccatcatcaacaccttccaccaatactctgtgaagctggggcacccagacaccctgaaccagggggaattcaaagagctggtgcgaaaagatctgcaaaattttctcaagaaggagaataagaatgaaaaggtcatagaacacatcatggaggacctggacacaaatgcagacaagcagctgagcttcgaggagttcatcatgctgatggcgaggctaacctgggcctcccacgagaagatgcacgagggtgacgagggccctggccaccaccataagccaggcctcggggagggcaccccctaagaccacagtggccaagatcacagtggccacggccatggccacagtcatggtggccacggccacaggccactaatcaggaggccaggccaccctgcctctacccaaccagggccccggggcctgttatgtcaaactgtcttggctgtggggctaggggctggggccaaataaagtctcttcctccaa

SEQ ID NO: 96 - DNA, 728 bp, Homo sapiens
  misc_feature: pituitary tumor-transforming 1(Homo sapiens)
gcggcctcagatgaatgcggctgttaagacctgcaataatccagaatggctactctgatctatgttgataaggaaaatggagaaccaggcacccgtgtggttgctaaggatgggctgaagctggggtctggaccttcaatcaaagccttagatgggagatctcaagtttcaacaccacgttttggcaaaacgttcgatgccccaccagccttacctaaagctactagaaaggctttgggaactgtcaacagagctacagaaaagtctgtaaagaccaagggacccctcaaacaaaaacagccaagcttttctgccaaaaagatgactgagaagactgttaaagcaaaaagctctgttcctgcctcagatgatgcctatccagaaatagaaaaattctttcccttcaatcctctagactttgagagttttgacctgcctgaagagcaccagattgcgcacctccccttgagtggagtgcctctcatgatccttgacgaggagagagagcttgaaaagctgtttcagctgggccccccttcacctgtgaagatgccctctccaccatgggaatccaatctgttgcagtctccttcaagcattctgtcgaccctggatgttgaattgccacctgtttgctgtgacatagatatttaaatttcttagtgcttcagagtttgtgtgtatttgtattaataaagcattcttcaacagaaaaaaaaaaaaaaaaa

SEQ ID NO: 97 - DNA, 2295 bp, Homo sapiens
  misc_feature: Fc fragment of IgG, low affinity IIa, receptor (CD32) (Homo sapiens)
gaattccaactatggagacccaaatgtctcagaatgtatgtcccagaaacctgtggctgcttcaaccattgacagttttgctgctgctggcttctgcagacagtcaagctgcagctcccccaaaggctgtgctgaaacttgagcccccgtggatcaacgtgctccaggaggactctgtgactctgacatgccagggggctcgcagccctgagagcgactccattcagtggttccacaatgggaatctcattcccacccacacgcagcccagctacaggttcaaggccaacaacaatgacagcggggagtacacgtgccagactggccagaccagcctcagcgaccctgtgcatctgactgtgctttccgaatggctggtgctccagacccctcacctggagttccaggagggagaaaccatcatgctgaggtgccacagctggaaggacaagcctctggtcaaggtcacattcttccagaatggaaaatcccagaaattctcccgtttggatcccaccttctccatcccacaagcaaaccacagtcacagtggtgattaccactgcacaggaaacataggctacacgctgttctcatccaagcctgtgaccatcactgtccaagtgcccagcatgggcagctcttcaccaatggggatcattgtggctgtggtcattgcgactgctgtagcagccattgttgctgctgtagtggccttgatctactgcaggaaaaagcggatttcagccaattccactgatcctgtgaaggctgcccaatttgagccacctggacgtcaaatgattgccatcagaaagagacaacttgaagaaaccaacaatgactatgaaacagctgacggcggctacatgactctgaaccccagggcacctactgacgatgataaaaacatctacctgactcttcctcccaacgaccatgtcaacagtaataactaaagagtaacgttatgccatgtggtcatactctcagcttgctgagtggatgacaaaaagaggggaattgttaaaggaaaatttaaatggagactggaaaaatcctgagcaaacaaaaccacctggcccttagaaatagctttaactttgcttaaactacaaacacaagcaaaacttcacggggtcatactacatacaagcataagcaaaacttaacttggatcatttctggtaaatgcttatgttagaaataagacaaccccagccaatcacaagcagcctactaacatataattaggtgactagggactttctaagaagatacctacccccaaaaaacaattatgtaattgaaaaccaaccgattgcctttattttgcttccacattttcccaataaatacttgcctgtgacattttgccactggaacactaaacttcatgaattgcgcctcagatttttcctttaacatcttttttttttttgacagagtctcaatctgttacccaggctggagtgcagtggtgctatcttggctcactgcaaacccgcctcccaggtttaagcgattctcatgcctcagcctcccagtagctgggattagaggcatgtgccatcatacccagctaatttttgtattttttattttttttttttagtagagacagggtttcgcaatgttggccaggccgatctcgaacttctggcctctagcgatctgcccgcctcggcctcccaaagtgctgggatgaccagcatcagccccaatgtccagcctctttaacatcttctttcctatgccctctctgtggatccctactgctggtttctgccttctccatgctgagaacaaaatcacctattcactgcttatgcagtcggaagctccagaagaacaaagagcccaattaccagaaccacattaagtctccattgttttgccttgggatttgagaagagaattagagaggtgaggatctggtatttcctggactaaattccccttggggaagacgaagggatgctgcagttccaaaagagaaggactcttccagagtcatctacctgagtcccaaagctccctgtcctgaaagccacagacaatatggtcccaaatgactgactgcaccttctgtgcctcagccgttcttgacatcaagaatcttctgttccacatccacacagccaatacaattagtcaaaccactgttattaacagatgtagcaacatgaaagacgctatgttacaggttacatgagagcaatcatgtaagtctatatgacttcagaaatgttaaaatagactaacctctaacaacaaattaaaagtgcggaattc

SEQ ID NO: 98 - DNA, 5523 bp, Homo sapiens
  misc_feature: zinc finger homeobox 1b(Homo sapiens)
ggcgatcacgttttcacatgatgctcacgctcagggcgcttcaattatccctccccacaaagataggtggcgcgtgtttcagggtctctcgtctctctcctacagaaaagaaaaagaaaaaaatgtcattagaagaggcgtaacacgtcagtccgtccccaggtttgtgtttcctggagtggccgaaagagatcagttctaacctgctctgcaggaataacggtcctgcctcccgacactcttggcgaggtttttgtacagtttgctccgggagctgtttcttcgcttccacctttttctcccccacacttcgcggcttcttcatgctttttcttctcaccatttctggccaaaactacaaacaagacttcgcagatcgagcctgcgtgctgccgaagcagggcgccgagtccatgcgaactgccatctgatccgctcttatcaatgaagcagccgatcatggcggatggcccccggtgcaagaggcgcaaacaagccaatcccaggaggaaaaacgtggtgaactatgacaatgtagtggacacaggttctgaaacagatgaggaagacaagcttcatattgctgaggatgacggtattgccaaccctctggaccaggagacgagtccagctagtgtgcccaaccatgagtcctccccacacgtgagccaagctctgttgccaagagaggaagaggaagatgaaataagggagggtggagtggaacacccctggcacaacaacgagattctacaagcctctgtagatggtccagaagaaatgaaggaagactatgacactatggggccagaagccacgatccagaccgcaattaacaatggtacagtgaagaatgcaaattgcacatcagattttgaggaatactttgccaaaagaaaactggaggaacgcgatggtcatgcagtcagcatcgaggagtaccttcagcgcagtgacacagccattatttacccagaagcccctgaggagctgtctcgccttggcacgccagaggccaatgggcaagaagaaaatgacctgccacctggaactccagatgcttttgcccaactgctgacctgcccctactgcgaccggggctacaagcgcttgacatcactgaaggagcacatcaagtaccgccacgagaagaatgaagagaacttttcctgccctctctgtagctacacgtttgcctaccgcacccagctcgagcggcatatggtgacacacaagccagggacagatcagcaccaaatgctaacccaaggagcaggtaatcgcaagttcaaatgcacagagtgtggcaaggccttcaaatataaacaccatctgaaagaacacctgcgaattcacagtggtgaaaaaccttacgagtgcccaaactgcaagaaacgtttctcccattctggttcctacagttcgcacatcagcagcaagaaatgtattggtttaatctctgtaaatggccgaatgagaaacaatatcaagacgggttcttcccctaattctgtttcttcttctcctactaattcagccattacccagttaagaaacaagttggagaatggaaaaccacttagtatgtctgaacagacaggcttacttaaaattaaaacagaaccactagacttcaatgactataaagttcttatggctacacacgggtttagtggcactagtccctttatgaatggtgggcttggagccaccagccctttaggagttcatccatctgctcagagtccaatgcagcacttaggtgtagggatggaagcccctttacttgggtttcccaccatgaatagtaatttaagtgaggtacaaaaggttctacagattgtggacaatactgtttccaggcaaaaaatggactgcaaggctgaagaaatttcaaagttgaaaggttatcacatgaaggatccatgctctcaacctgaggaacaaggagttacttctcctaatattccgcctgtcggtcttccggtagtgagtcataatggtgccactaaaagtattattgactatacgttggaaaaagtcaatgaagccaaagcttgcctccagagcttgactactgactcaaggagacagatcagtaatataaagaaagagaagctacgtactttaatagatttggtcactgatgacaaaatgattgagaaccacaacatatccactccattttcatgccagttctgtaaagaaagttttcctggccccatccctttgcatcagcatgaacgttacctttgtaagatgaatgaagagatcaaggcggtcctgcagcctcatgaaaacatagtccccaacaaagccggagtttttgttgataataaagccctcctcttgtcatctgtactttctgagaaaggaatgacaagccccatcaacccatacaaggaccacatgtctgtactcaaagcatactatgctatgaacatggagcccaactccgatgaactgctgaaaatttccattgctgtgggccttcctcaggaatttgtgaaggaatggtttgaacaacgaaaagtctaccagtactcaaattccaggtccccatccctggaaagaagctccaagccgttagctcccaacagtaaccctcccacaaaagactctttattacccaggtctcctgtaaaacctatggactccataacatcaccatctatagcagaactccacaacagtgttacgaattgtgatcctcctctcaggctaacaaaaccttcccattttaccaatattaaaccagttgaaaaattggaccactccaggagtaatactccttctcccttaaatctttcctccacatcttctaaaaactcccacagtagttcatacactccaaacagcttctcttctgaggagctccaggctgagcctttagacttgtcattaccaaaacaaatgaaagaacccaaaagtattatagccacaaagaacaaaacaaaagctagtagcatcagtttagatcataacagtgtttcttcctcatctgaaaactcagatgagcctctgaacttgacttttatcaagaaggaattttcaaattcaaataatctggacaacaaaagcactaacccagtgttcagcatgaacccatttagtgccaaacctttatacacagctcttccacctcaaagcgcatttccccctgctactttcatgccaccagtccagaccagtattcctgggctacgaccatacccaggactggatcagatgagcttcctaccacatatggcctacacctacccaactggagcagctacttttgctgatatgcagcaaaggagaaagtaccagcggaaacaaggatttcagggagaattgcttgatggagcacaagactacatgtcaggcctagatgatatgacagactccgactcctgtctgtctcgcaaaaagatcaagaagacagagagtggcatgtatgcatgtgacttatgtgacaagacattccagaaaagcagttcccttctgcgacataaatacgaacacacaggaaaaagaccacatcagtgtcagatttgtaagaaagcgtttaaacacaagcaccaccttatcgagcactcaaggcttcactcgggcgagaagccctatcagtgtgataaatgtggcaagcgcttctcacactcgggctcgtactcgcagcacatgaatcacaggtattcctactgcaagcgggaggcggaggagcgggaagcggcggagcgcgaggcgcgcgagaaagggcacttggaacccaccgagctgctgatgaaccgggcttacttgcagagcattacccctcaggggtactctgactcggaggagagggagagtatgccgagggatggcgagagcgagaaggagcacgagaaagaaggcgaggatggctacgggaagctgggcagacaggatggcgacgaggagttcgaggaggaagaggaagaaagtgaaaataaaagtatggatacggatcccgaaacgatacgagatgaagaagagactggagatcactccatggacgatagttcggaggatgggaaaatggaaaccaaatcagaccacgaggaagacaatatggaagatggcatgtaataaactactgcattttaagcttcctatttttttttccagtagtattgttacctgcttgaaaacactgctgtgttaagctgttcatgcacgtgcctgacgcttccaggaagctgtagagagggacagaaggggcggttcagccaagacagatgtagacggagttggagctgggtattgttaaaaactgcattatgcaaaaattttgtacagtgttaaggcctaaaaactgtgtggttcagagactaattcctgtgtttaatagcatttatactttaagcacaactagaaaattgtaagaattgcactctacttatgtatcactacaaactttaaaaaactatgtctaatttatattaatacattttaaaaaggtgcccgcactaccatacatcagtatttttattattattattgttattcctttttaatttaatgtgctcgcactacaatgcatcagtattatgattcctctgtactttcctttcgctattcatcaatttcccatttttttttttcagcttaagtaaccacacaattttaggcctcaatttttttttttttctgtgaaggaacttgaagtgatgcatgtgtgaatttaagataccgaagtcttaaagtgacctggacgtgaaggaaaaagtaagatgagaaataaagaaagcctttgtaaggtggttttaaaagccttatatgcaaaccttttaatctgtgtttctgcaagtgccatccttgtacagtgttaagagggtaacatgggttacctttgcaccagcttcagtgttaagctcaccctgttctttgaagcacccatgtcagtattagaagaataggcagcagttccttagtttacatatgtttgtgcaattattttctgtacttttttgttcattaattttgtcagtattacaccaaactgtttttgcaacaaaaaaattttttttgcattcatttaattttaggtcaaataacattttatttatgtggctcattttatatttcctaattttatttatttcatactgtagtgtacagtattatagttcttcaatatatagatatattttagtaaaaaaggaacatgacgttgatcatttgggcaaattttacgtaaagagaagagcatttattgtgttttggaacattaattgtgagatgggatttttcaattttattattttatttttgtttttttccaattactggaaattccaaatttgggaacttttgatacgatcttgtgaaaacactgtattttcgactgaaaattccactttcttcatcttgttttttagctaaaaagagggactgttaaatacaatgtatgataccatgacaaaaatctttcctgaattgtctttgtaaaagtattattgaattttcaatttgtaatttcttttgaaaatgaccatgctcgaataaaaatgtagccaaact

SEQ ID NO: 99 - DNA, 1311 bp, Homo sapiens
  misc_feature: 3-hydroxyisobutyryl-Coenzyme A hydrolase (Homo sapiens)
agtccgggagattctcgctctgctgctttagtttcggagtgtttggcgacggggcagcgcgagatgtggaggctcatgtcgaggtttaatgcattcaaaaggactaataccatactgcaccatttgagaatgtccaagcacacagatgcagcagaagaggtgctattggaaaaaaaaggttgcgcgggagtcataacactaaacagaccaaagttcctcaatgcactgactcttaatatgattcggcagatttatccacagctaaagaagtgggaacaagatcctgaaactttcgtgatcattataaagggagcaggaggaaaggctttctgtgccgggggtgatatcagagtgatctcggaagctgaaaaggcaaaacagaagatagctccagttttcttcagagaagaatatatgctgaataatgctgttggttcttgccagaaaccttatgttgcacttattcatggaattacaatgggtgggggagttggtctctcagtccatgggcaatttcgagtggctacagaaaagtgtctttttgctatgccagaaactgcaataggactgttccctgatgtgggtggaggttatttctttgccacgactccaaggaaaacttggttacttccttgcattaacggattcagactaaaaggaagagatgtgtacagagcaggaattgctacacactttgtagattctgaaaagttggccatgttagaggaagatttgttagccttgaaatctccttcaaaagaaaatattgcatctgtcttagaaaattaccatacagagtctaagattgatcgagacaagtcttttatacttgaggaacacatggacaaaataaacagttgtttttcagccaatactgtggaagaaattattgaaaacttacagcaagatggttcatcttttgccctagagcaattgaaggtaattaataaaatgtctccaacatctctaaagatcacactaaggcaactcatggaggggtcttcaaagaccttgcaagaagtactaactatggagtatcggctaagtcaagcttgtatgagaggtcatgactttcatgaaggcgttagagctgttttaattgataaagaccagagtccaaaatggaaaccagctgatctaaaagaagttactgaggaagatttgaataatcactttaagtctttgggaagcagtgatttgaaattttgaggtgacaggcttttaaggtatattttgtagcatgggttggcaatctacagcatgtgggccaaatccagcctgctgcctgtttttatataccctgtaagcaag

SEQ ID NO: 100 - DNA, 3583 bp, Homo sapiens
  misc_feature: BUB1 budding uninhibited by benzimidazoles 1 homolog beta (yeast) (Homo sapiens)
aaaggcctgcagcaggacgaggacctgagccaggaatgcaggatggcggcggtgaagaaggaagggggtgctctgagtgaagccatgtccctggagggagatgaatgggaactgagtaaagaaaatgtacaacctttaaggcaagggcggatcatgtccacgcttcagggagcactggcacaagaatctgcctgtaacaatactcttcagcagcagaaacgggcatttgaatatgaaattcgattttacactggaaatgaccctctggatgtttgggataggtatatcagctggacagagcagaactatcctcaaggtgggaaagagagtaatatgtcaacgttattagaaagagctgtagaagcactacaaggagaaaaacgatattatagtgatcctcgatttctcaatctctggcttaaattagggcgtttatgcaatgagcctttggatatgtacagttacttgcacaaccaagggattggtgtttcacttgctcagttctatatctcatgggcagaagaatatgaagctagagaaaactttaggaaagcagatgcgatatttcaggaagggattcaacagaaggctgaaccactagaaagactacagtcccagcaccgacaattccaagctcgagtgtctcggcaaactctgttggcacttgagaaagaagaagaggaggaagtttttgagtcttctgtaccacaacgaagcacactagctgaactaaagagcaaagggaaaaagacagcaagagctccaatcatccgtgtaggaggtgctctcaaggctccaagccagaacagaggactccaaaatccatttcctcaacagatgcaaaataatagtagaattactgtttttgatgaaaatgctgatgaggcttctacagcagagttgtctaagcctacagtccagccatggatagcaccccccatgcccagggccaaagagaatgagctgcaagcaggcccttggaacacaggcaggtccttggaacacaggcctcgtggcaatacagcttcactgatagctgtacccgctgtgcttcccagtttcactccatatgtggaagagactgcacaacagccagttatgacaccatgtaaaattgaacctagtataaaccacatcctaagcaccagaaagcctggaaaggaagaaggagatcctctacaaagggttcagagccatcagcaagcgtctgaggagaagaaagagaagatgatgtattgtaaggagaagatttatgcaggagtaggggaattctcctttgaagaaattcgggctgaagttttccggaagaaattaaaagagcaaagggaagccgagctattgaccagtgcagagaagagagcagaaatgcagaaacagattgaagagatggagaagaagctaaaagaaatccaaactactcagcaagaaagaacaggtgatcagcaagaagagacgatgcctacaaaggagacaactaaactgcaaattgcttccgagtctcagaaaataccaggaatgactctatccagttctgtttgtcaagtaaactgttgtgccagagaaacttcacttgcggagaacatttggcaggaacaacctcattctaaaggtcccagtgtacctttctccatttttgatgagtttcttctttcagaaaagaagaataaaagtcctcctgcagatcccccacgagttttagctcaacgaagaccccttgcagttctcaaaacctcagaaagcatcacctcaaatgaagatgtgtctccagatgtttgtgatgaatttacaggaattgaacccttgagcgaggatgccattatcacaggcttcagaaatgtaacaatttgtcctaacccagaagacacttgtgactttgccagagcagctcgttttgtatccactccttttcatgagataatgtccttgaaggatctcccttctgatcctgagagactgttaccggaagaagatctagatgtaaagacctctgaggaccagcagacagcttgtggcactatctacagtcagactctcagcatcaagaagctgagcccaattattgaagacagtcgtgaagccacacactcctctggcttctctggttcttctgcctcggttgcaagcacctcctccatcaaatgtcttcaaattcctgagaaactagaacttactaatgagacttcagaaaaccctactcagtcaccatggtgttcacagtatcgcagacagctactgaagtccctaccagagttaagtgcctctgcagagttgtgtatagaagacagaccaatgcctaagttggaaattgagaaggaaattgaattaggtaatgaggattactgcattaaacgagaatacctaatatgtgaagattacaagttattctgggtggcgccaagaaactctgcagaattaacagtaataaaggtatcttctcaacctgtcccatgggacttttatatcaacctcaagttaaaggaacgtttaaatgaagattttgatcatttttgcagctgttatcaatatcaagatggctgtattgtttggcaccaatatataaactgcttcacccttcaggatcttctccaacacagtgaatatattacccatgaaataacagtgttgattatttataaccttttgacaatagtggagatgctacacaaagcagaaatagtccatggtgacttgagtccaaggtgtctgattctcagaaacagaatccacgatccctatgattgtaacaagaacaatcaagctttgaagatagtggacttttcctacagtgttgaccttagggtgcagctggatgtttttaccctcagcggctttcggactgtacagatcctggaaggacaaaagatcctggctaactgttcttctccctaccaggtagacctgtttggtatagcagatttagcacatttactattgttcaaggaacacctacaggtcttctgggatgggtccttctggaaacttagccaaaatatttctgagctaaaagatggtgaattgtggaataaattctttgtgcggattctgaatgccaatgatgaggccacagtgtctgttcttggggagcttgcagcagaaatgaatggggtttttgacactacattccaaagtcacctgaacaaagccttatggaaggtagggaagttaactagtcctggggctttgctctttcagtgagctaggcaatcaagtctcacagattgctgcctcagagcaatggttgtattgtggaacactgaaactgtatgtgctgtaatttaatttaggacacatttagatgcactaccattgctgttctactttttggtacaggtatattttgacgtcactgatattttttatacagtgatatacttactcatggccttgtctaacttttgtgaagaactattttattctaaacagactcattacaaatggttaccttgttatttaacccatttgtctctacttttccctgtacttttcccatttgtaatttgtaaaatgttctcttatgatcaccatgtattttgtaaataataaaatagtatctgttaaaaaaaaaaaaaaaaaaaaaaaaaaa

SEQ ID NO: 101 - DNA, 4050 bp, Homo sapiens
  misc_feature: thrombomodulin (Homo sapiens)
cttgcaatccaggctttccttggaagtggctgtaacatgtatgaaaagaaagaaaggaggaccaagagatgaaagagggctgcacgcgtgggggcccgagtggtgggcggggacagtcgtcttgttacaggggtgctggccttccctggcgcctgcccctgtcggccccgcccgagaacctccctgcgccagggcagggtttactcatcccggcgaggtgatcccatgcgcgagggcgggcgcaagggcggccagagaacccagcaatccgagtatgcggcatcagcccttcccaccaggcacttccttccttttcccgaacgtccagggagggagggccgggcacttataaactcgagccctggccgatccgcatgtcagaggctgcctcgcaggggctgcgcgcacggcaagaagtgtctgggctgggacggacaggagaggctgtcgccatcggcgtcctgtgcccctctgctccggcacggccctgtcgcagtgcccgcgctttccccggcgcctgcacgcggcgcgcctgggtaacatgcttggggtcctggtccttggcgcgctggccctggccggcctggggttccccgcacccgcagagccgcagccgggtggcagccagtgcgtcgagcacgactgcttcgcgctctacccgggccccgcgaccttcctcaatgccagtcagatctgcgacggactgcggggccacctaatgacagtgcgctcctcggtggctgccgatgtcatttccttgctactgaacggcgacggcggcgttggccgccggcgcctctggatcggcctgcagctgccacccggctgcggcgaccccaagcgcctcgggcccctgcgcggcttccagtgggttacgggagacaacaacaccagctatagcaggtgggcacggctcgacctcaatggggctcccctctgcggcccgttgtgcgtcgctgtctccgctgctgaggccactgtgcccagcgagccgatctgggaggagcagcagtgcgaagtgaaggccgatggcttcctctgcgagttccacttcccagccacctgcaggccactggctgtggagcccggcgccgcggctgccgccgtctcgatcacctacggcaccccgttcgcggcccgcggagcggacttccaggcgctgccggtgggcagctccgccgcggtggctcccctcggcttacagctaatgtgcaccgcgccgcccggagcggtccaggggcactgggccagggaggcgccgggcgcttgggactgcagcgtggagaacggcggctgcgagcacgcgtgcaatgcgatccctggggctccccgctgccagtgcccagccggcgccgccctgcaggcagacgggcgctcctgcaccgcatccgcgacgcagtcctgcaacgacctctgcgagcacttctgcgttcccaaccccgaccagccgggctcctactcgtgcatgtgcgagaccggctaccggctggcggccgaccaacaccggtgcgaggacgtggatgactgcatactggagcccagtccgtgtccgcagcgctgtgtcaacacacagggtggcttcgagtgccactgctaccctaactacgacctggtggacggcgagtgtgtggagcccgtggacccgtgcttcagagccaactgcgagtaccagtgccagcccctgaaccaaactagctacctctgcgtctgcgccgagggcttcgcgcccattccccacgagccgcacaggtgccagatgttttgcaaccagactgcctgtccagccgactgcgaccccaacacccaggctagctgtgagtgccctgaaggctacatcctggacgacggtttcatctgcacggacatcgacgagtgcgaaaacggcggcttctgctccggggtgtgccacaacctccccggtaccttcgagtgcatctgcgggcccgactcggcccttgcccgccacattggcaccgactgtgactccggcaaggtggacggtggcgacagcggctctggcgagcccccgcccagcccgacgcccggctccaccttgactcctccggccgtggggctcgtgcattcgggcttgctcataggcatctccatcgcgagcctgtgcctggtggtggcgcttttggcgctcctctgccacctgcgcaagaagcagggcgccgccagggccaagatggagtacaagtgcgcggccccttccaaggaggtagtgctgcagcacgtgcggaccgagcggacgccgcagagactctgagcggcctccgtccaggagcctggctccgtccaggagctgtgcctcctcacccccagctttgctaccaaagcaccttagctggcattacagctggagaagaccctccccgcaccccccaagctgttttcttctattccatggctaactggcgagggggtgattagagggaggagaatgagcctcggcctcttccgtgacgtcactggaccactgggcaatgatggcaattttgtaacgaagacacagactgcgatttgtcccaggtcctcactaccgggcgcaggagggtgagcgttattggtcggcagccttctgggcagaccttgacctcgtgggctagggatgactaaaatatttattttttttaagtatttaggtttttgtttgtttcctttgttcttacctgtatgtctccagtatccactttgcacagctctccggtctctctctctctacaaactcccacttgtcatgtgacaggtaaactatcttggtgaatttttttttcctagccctctcacatttatgaagcaagccccacttattccccattcttcctagttttctcctcccaggaactgggccaactcacctgagtcaccctacctgtgcctgaccctacttcttttgctcatctagctgtctgctcagacagaacccctacatgaaacagaaacaaaaacactaaaaataaaaatggccatttgctttttcaccagatttgctaatttatcctgaaatttcagattcccagagcaaaataattttaaacaaagggttgagatgtaaaaggtattaaattgatgttgctggactgtcatagaaattacacccaaagaggtatttatctttacttttaaacagtgagcctgaattttgttgctgttttgatttgtactgaaaaatggtaattgttgctaatcttcttatgcaatttccttttttgttattattacttatttttgacagtgttgaaaatgttcagaaggttgctctagattgagagaagagacaaacacctcccaggagacagttcaagaaagcttcaaactgcatgattcatgccaattagcaattgactgtcactgttccttgtcactggtagaccaaaataaaaccagctctactggtcttgtggaattgggagcttgggaatggatcctggaggatgcccaattagggcctagccttaatcaggtcctcagagaatttctaccatttcagagaggccttttggaatgtggcccctgaacaagaattggaagctgccctgcccatgggagctggttagaaatgcagaatcctaggctccaccccatccagttcatgagaatctatatttaacaagatctgcagggggtgtgtctgctcagtaatttgaggacaaccattccagactgcttccaattttctggaatacatgaaatatagatcagttataagtagcaggccaagtcaggcccttattttcaagaaactgaggaattttctttgtgtagctttgctctttggtagaaaaggctaggtacacagctctagacactgccacacagggtctgcaaggtctttggttcagctaagctaggaatgaaatcctgcttcagtgtatggaaataaatgtatcatagaaatgtaacttttgtaagacaaaggttttcctcttctattttgtaaactcaaaatatttgtacatagttatttatttattggagataatctagaacacaggcaaaatccttgcttatgacatcacttgtacaaaataaacaaataacaatgtg

SEQ ID NO: 102 - DNA, 4266 bp, Homo sapiens
  misc_feature: cytochrome b-245, beta polypeptide (chronic granulomatous disease) (Homo sapiens)
cttcctctgccaccatggggaactgggctgtgaatgaggggctctccatttttgtcattctggtttggctggggttgaacgtcttcctctttgtctggtattaccgggtttatgatattccacctaagttcttttacacaagaaaacttcttgggtcagcactggcactggccagggcccctgcagcctgcctgaatttcaactgcatgctgattctcttgccagtctgtcgaaatctgctgtccttcctcaggggttccagtgcgtgctgctcaacaagagttcgaagacaactggacaggaatctcacctttcataaaatggtggcatggatgattgcacttcactctgcgattcacaccattgcacatctatttaatgtggaatggtgtgtgaatgcccgagtcaataattctgatccttattcagtagcactctctgaacttggagacaggcaaaatgaaagttatctcaattttgctcgaaagagaataaagaaccctgaaggaggcctgtacctggctgtgaccctgttggcaggcatcactggagttgtcatcacgctgtgcctcatattaattatcacttcctccaccaaaaccatccggaggtcttactttgaagtcttttggtacacacatcatctctttgtgatcttcttcattggccttgccatccatggagctgaacgaattgtacgtgggcagaccgcagagagtttggctgtgcataatataacagtttgtgaacaaaaaatctcagaatggggaaaaataaaggaatgcccaatccctcagtttgctggaaaccctcctatgacttggaaatggatagtgggtcccatgtttctgtatctctgtgagaggttggtgcggttttggcgatctcaacagaaggtggtcatcaccaaggtggtcactcaccctttcaaaaccatcgagctacagatgaagaagaaggggttcaaaatggaagtgggacaatacatttttgtcaagtgcccaaaggtgtccaagctggagtggcacccttttacactgacatccgcccctgaggaagacttctttagtatccatatccgcatcgttggggactggacagaggggctgttcaatgcttgtggctgtgataagcaggagtttcaagatgcgtggaaactacctaagatagcggttgatgggccctttggcactgccagtgaagatgtgttcagctatgaggtggtgatgttagtgggagcagggattggggtcacacccttcgcatccattctcaagtcagtctggtacaaatattgcaataacgccaccaatctgaagctcaaaaagatctacttctactggctgtgccgggacacacatgcctttgagtggtttgcagatctgctgcaactgctggagagccagatgcaggaaaggaacaatgccggcttcctcagctacaacatctacctcactggctgggatgagtctcaggccaatcactttgctgtgcaccatgatgaggagaaagatgtgatcacaggcctgaaacaaaagactttgtatggacggcccaactgggataatgaattcaagacaattgcaagtcaacaccctaataccagaataggagttttcctctgtggacctgaagccttggctgaaaccctgagtaaacaaagcatctccaactctgagtctggccctcggggagtgcatttcattttcaacaaggaaaacttctaacttgtctcttccatgaggaaataaatgtgggttgtgctgccaaatgctcaaataatgctaattgataatataaataccccctgcttaaaaatggacaaaaagaaactataatgtaatggttttcccttaaaggaatgtcaaagattgtttgatagtgataagttacatttatgtggagctctatggttttgagagcacttttacaaacattatttcatttttttcctctcagtaatgtcagtggaagttagggaaaagattcttggactcaattttagaatcaaaagggaaaggatcaaaaggttcagtaacttccctaagattatgaaactgtgaccagatctagcccatcttactccaggtttgatactctttccacaatactgagctgcctcagaatcctcaaaatcagtttttatattccccaaaagaagaaggaaaccaaggagtagctatatatttctactttgtgtcatttttgccatcattattatcatactgaaggaaattttccagatcattaggacataatacatgttgagagtgtctcaacacttattagtgacagtattgacatctgagcatactccagtttactaatacagcagggtaactgggccagatgttctttctacagaagaatattggattgattggagttaatgtaatactcatcatttaccactgtgcttggcagagagcggatactcaagtaagttttgttaaatgaatgaatgaatttagaaccacacaatgccaagatagaattaatttaaagccttaaacaaaatttatctaaagaaataacttctattactgtcatagaccaaaggaatctgattctccctagggtcaagaacaggctaaggatactaaccaataggattgcctgaagggttctgcacattcttatttgaagcatgaaaaaagagggttggaggtggagaattaacctcctgccatgactctggctcatctagtcctgctccttgtgctataaaataaatgcagactaatttcctgcccaaagtggtcttctccagctagcccttatgaatattgaacttaggaattgtgacaaatatgtatctgatatggtcatttgttttaaataacacccaccccttattttccgtaaatacacacacaaaatggatcgcatctgtgtgactaatggtttatttgtattatatcatcatcatcatcctaaaattaacaacccagaaacaaaaatctctatacagagatcaaattcacactcaatagtatgttctgaatatatgttcaagagagagtctctaaatcactgttagtgtggccaagagcagggttttctttttgttcttagaactgctcccatttctgggaactaaaaccagttttatttgccccaccccttggagccacaaatgtttagaactcttcaacttcggtaatgaggaagaaggagaaagagctgggggaagggcagaagactggtttaggaggaaaaggaaataaggagaaaagagaatgggagagtgagagaaaataaaaaaggcaaaagggagagagaggggaagggggtctcatattggtcattccctgccccagatttcttaaagtttgatatgtatagaatataattgaaggaggtatacacatactgatgttgttttgattatctatggtattgaatcttttaaaatctggtcacaaattttgatgctgagggggattattcaagggactaggatgaactaaataagaactcagttgttctttgtcatactactattcctttcgtctcccagaatcctcagggcactgagggtaggtctgacaaataaggcctgctgtgcgaatatagcctttctgaaatgtaccaggatggtttctgcttagagacacttaggtccagcctgttcacactgcacctcaggtatcaattcatctattcaacagatatttattgtgttattactatgagtcaggctctgtttattgtttcaattctttacaccaaagtatgaactggagagggtacctcagttataaggagtctgagaatattggccctttctaacctatgtgcataattaaaaccagcttcatttgttgctccgagagtgtttctccaaggttttctatcttcaaaaccaactaagttatgaaagtagagagatctgccctgtgttatccagttatgagataaaaaatgaatataagagtgcttgtcattataaaagtttcctttttatctctcaagccaccagctgccagccaccacgagccagctgccagcctagctttttttttttttttttttttagcacttagtatttagcatttattaacaggtactctaagaatgatgaagcattgtttttaatcttaagactatgaaggtttttcttagttcttctgcttttgcaattgtgtttgtgaaatttgaatacttgcaggctttgtatgtgaataattctagcgggggacctgggagataattctacggggaattcttaaaactgtgctcaactattaaaatgaatgagctttc

SEQ ID NO: 103 - DNA, 2021 bp, Homo sapiens
  misc_feature: CDC6 cell division cycle 6 homolog (S. cerevisiae) (Homo sapiens)
  misc_feature (1886)..(1886): n is a, c, g, or t
  misc_feature (1896)..(1896): n is a, c, g, or t
  misc_feature (1928)..(1928): n is a, c, g, or t
  misc_feature (1934)..(1934): n is a, c, g, or t
  misc_feature (1973)..(1973): n is a, c, g, or t
  misc_feature (2010)..(2010): n is a, c, g, or t
gaattccggggaggcctggggtctgtgaggcagcggagctgggtgaaggctgcgggttccggcgaggcctgagctgtgctgtcgtcatgcctcaaacccgatcccaggcacaggctacaatcagttttccaaaaaggaagctgtctcgggcattgaacaaagctaaaaactccagtgatgccaaactagaaccaacaaatgtccaaaccgtaacctgttctcctcgtgtaaaagccctgcctctcagccccaggaaacgtctgggcgatgacaacctatgcaacactccccatttacctccttgttctccaccaaagcaaggcaagaaagagaatggtccccctcactcacatacacttaagggacgaagattggtatttgacaatcagctgacaattaagtctcctagcaaaagagaactagccaaagttcaccaaaacaaaatactttcttcagttagaaaaagtcaagagatcacaacaaattctgagcagagatgtccactgaagaaagaatctgcatgtgtgagactattcaagcaagaaggcacttgctaccagcaagcaaagctggtcctgaacacagctgtcccagatcggctgcctgccagggaaagggagatggatgtcatcaggaatttcttgagggaacacatctgtgggaaaaaagctggaagcctttacctttctggtgctcctggaactggaaaaactgcctgcttaagccggattctgcaagacctcaagaaggaactgaaaggctttaaaactatcatgctgaattgcatgtccttgaggactgcccaggctgtattcccagctattgctcaggagatttgtcaggaagaggtatccaggccagctgggaaggacatgatgaggaaattggaaaaacatatgactgcagagaagggccccatgattgtgttggtattggacgagatggatcaactggacagcaaaggccaggatgtattgtacacgctatttgaatggccatggctaagcaattctcacttggtgctgattggtattgctaataccctggatctcacagatagaattctacctaggcttcaagctagagaaaaatgtaagccacagctgttgaacttcccaccttataccagaaatcagatagtcactattttgcaagatcgacttaatcaggtatctagagatcaggttctggacaatgctgcagttcaattctgtgcccgcaaagtctctgctgtttcaggagatgttcgcaaagcactggatgtttgcaggagagctattgaaattgtagagtcagatgtcaaaagccagactattctcaaaccactgtctgaatgtaaatcaccttctgagcctctgattcccaagagggttggtcttattcacatatcccaagtcatctcagaagttgatggtaacaggatgaccttgagccaagaaggagcacaagattccttccctcttcagcagaagatcttggtttgctctttgatgctcttgatcaggcagttgaaaatcaaagaggtcactctggggaagttatatgaagcctacagtaaagtctgtcgcaaacagcaggtggcggctgtggaccagtcagagtgtttgtcactttcagggctcttggaagccaggggcattttaggattaaagagaaacaaggaaacccgtttgacaaaggtgtttttcaagattgaagagaaagaaatagaacatgctctgaaagataaagctttaattggaaatatcttagctactggattgccttaaattcttctcttacaccccacccgaaagtattcagctgggcatttagagagctacagtcttcattttagtgctttacacattcgggcctgaaaacaaatatgaccttttttacttganggccaatggnattttaatctataggattcttttaatattagncacagnaattaatatctttgggggtctttacttatttttaccccnttaaaaagtgaccggggtaggaccccttttttaattnccatttcacta

SEQ ID NO: 104 - DNA, 1248 bp, Homo sapiens
  misc_feature: CCAAT/enhancer binding protein (C/EBP), delta (Homo sapiens)
gacagcctcgcttggacgcagagcccggcccgacgccgccatgagcgccgcgctcttcagcctggacggcccggcgcgcggcgcgccctggcctgcggagcctgcgcccttctacgaaccgggccgggcgggcaagccgggccgcggggccgagccaggggccctaggcgagccaggcgccgccgcccccgccatgtacgacgacgagagcgccatcgacttcagcgcctacatcgactccatggccgccgtgcccaccctggagctgtgccacgacgagctcttcgccgacctcttcaacagcaatcacaaggcgggcggcgcggggcccctggagcttcttcccggcggccccgcgcgccccttgggcccgggccctgccgctccccgcctgctcaagcgcgagcccgactggggcgacggcgacgcgcccggctcgctgttgcccgcgcaggtgggcccgtgcgcacagaccgtggtgagcttggcggccgcagggcagcccaccccgcccacgtcgccggagccgccgcgcagcagccccaggcagacccccgcgcccggccccgcccgggagaagagcgccggcaagaggggcccggaccgcggcagccccgagtaccggcagcggcgcgagcgcaacaacatcgccgtgcgcaagagccgcgacaaggccaagcggcgcaaccaggagatgcagcagaagttggtggagctgtcggctgagaacgagaagctgcaccagcgcgtggagcagctcacgcgggacctggccggcctccggcagttcttcaagcagctgcccagcccgcccttcctgccggccgccgggacagcagactgccggtaacgcgcggccggggcgggagagactcagcaacgacccatacctcagacccgacggcccggagcggagcgcgccctgccctggcgcagccagagccgccgggtgcccgctgcagtttcttgggacataggagcgcaaagaagctacagcctggacttaccaccactaaactgcgagagaagctaaacgtgtttattttcccttaaattatttttgtaatggtagctttttctacatcttactcctgttgatgcagctaaggtacatttgtaaaaagaaaaaaaaccagacttttcagacaaaccctttgtattgtagataagaggaaaagactgagcatgctcacttttttatattaatttttacagtatttgtaagaataaagcagcatttgaaatcgc

SEQ ID NO: 105 - DNA, 3280 bp, Homo sapiens
  misc_feature: fucosyltransferase 8 (alpha (1,6) fucosyltransferase)     (Homo sapiens)
  misc_feature (4)..(4): n is a, c, g, or t
  misc_feature (36)..(36): n is a, c, g, or t
  misc_feature (50)..(50): n is a, c, g, or t
  misc_feature (56)..(56): n is a, c, g, or t
  misc_feature (60)..(60): n is a, c, g, or t
ggcncgacccgagcagccggttccctcctctccagnccccctcctcattncacccncgcngcctggcccagcgacccgtcccttcgtctccccgcggaatggggccggcactgctcagggtcgcgcgccctggacccagctcgctctcggtctcgcgctgtcaggactgcccggctcgcgccgcctcgcgctctgcctcagtcagtggcccgaacgtccgttaagcggcggcgcggttcctgtttccgtttcttcctctccgttcggtcgggagtagcatcctccactcagccacccttcccactcccccatcgtggggcagctgcggctgagggctgtggctttggcagctgcgacggggagcggcggagaccgtctgctcccgcctggggttgctgcttttgctcagaggacatccatgaccctaatggtctttttgttcaagataaagtgattttttgcctttgttgattaactggacaaattcagcatgtagagcgcatgaagtacaggacaataaagcttcctacacatatcaccaggaggatctctttgaaagattcactgcaggactaccagagagaataatttgtctgaagcatcatgtgttgaaacaacagaagtctattcacctgtgcactaactagaaacagagttacaatgttttcaattctttgagctccaggactccagggaagtgagttgaaaatctgaaaatgcggccatggactggttcctggcgttggattatgctcattctttttgcctgggggaccttgctgttttatataggtggtcacttggtacgagataatgaccatcctgatcactctagccgagaactgtccaagattctggcaaagcttgaacgcttaaaacagcagaatgaagacttgaggcgaatggccgaatctctccggataccagaaggccctattgatcaggggccagctataggaagagtacgcgttttagaagagcagcttgttaaggccaaagaacagattgaaaattacaagaaacagaccagaaatggtctggggaaggatcatgaaatcctgaggaggaggattgaaaatggagctaaagagctctggtttttcctacagagtgaattgaagaaattaaagaacttagaaggaaatgaactccaaagacatgcagatgaatttcttttggatttaggacatcatgaaaggtctataatgacggatctatactacctcagtcagacagatggagcaggtgattggcgggaaaaagaggccaaagatctgacagaactggttcagcggagaataacatatcttcagaatcccaaggactgcagcaaagccaaaaagctggtgtgtaatatcaacaaaggctgtggctatggctgtcagctccatcatgtggtctactgcttcatgattgcatatggcacccagcgaacactcatcttggaatctcagaattggcgctatgctactggtggatgggagactgtatttaggcctgtaagtgagacatgcacagacagatctggcatctccactggacactggtcaggtgaagtgaaggacaaaaatgttcaagtggtcgagcttcccattgtagacagtcttcatccccgtcctccatatttacccttggctgtaccagaagacctcgcagatcgacttgtacgagtgcatggtgaccctgcagtgtggtgggtgtctcagtttgtcaaatacttgatccgcccacagccttggctagaaaaagaaatagaagaagccaccaagaagcttggcttcaaacatccagttattggagtccatgtcagacgcacagacaaagtgggaacagaagctgccttccatcccattgaagagtacatggtgcatgttgaagaacattttcagcttcttgcacgcagaatgcaagtggacaaaaaaagagtgtatttggccacagatgacccttctttattaaaggaggcaaaaacaaagtaccccaattatgaatttattagtgataactctatttcctggtcagctggactgcacaatcgatacacagaaaattcacttcgtggagtgatcctggatatacattttctctctcaggcagacttcctagtgtgtactttttcatcccaggtctgtcgagttgcttatgaaattatgcaaacactacatcctgatgcctctgcaaacttccattctttagatgacatctactattttgggggccagaatgcccacaatcaaattgccatttatgctcaccaaccccgaactgcagatgaaattcccatggaacctggagatatcattggtgtggctggaaatcattgggatggctattctaaaggtgtcaacaggaaattgggaaggacgggcctatatccctcctacaaagttcgagagaagatagaaacggtcaagtaccccacatatcctgaggctgagaaataaagctcagatggaagagataaacgaccaaactcagttcgaccaaactcagttcaaaccatttgagccaaactgtagatgaagagggctctgatctaacaaaataaggttatatgagtagatactctcagcaccaagagcagctgggaactgacataggcttcaattggtggaattcctctttaacaagggctgcaatgcctcatacccatgcacagtacaataatgtactcacatataacatgcaaacaggttgttttctactttgcccctttcagtatgtccccataagacaaacactgccatattgtgtaatttaagtgacacagacattttgtgtgagacttaaaacatggtgcctatatctgagagacctgtgtgaactattgagaagatcggaacagctccttactctgaggaagttgattcttatttgatggtggtattgtgaccactgaattcactccagtcaacagattcagaatgagaatggacgtttggtttttttttgtttttgtttttgttttttcctttataaggttgtctgtttttttttttttaaataattgcatcagttcattgacctcatcattaataagtgaagaatacatcagaaaataaaatattcactctccattagaaaattttgtaaaacaatgccatgaacaaattctttagtactcaatgtttctggacattctctttgataacaaaaaataaattttaaaaaggaattttgtaaaagtttctagaattttatatcattggatgatatgttgatcagccttatgtggaagaactgtgataaaaagaggagctttttagtttttcaaaaaaaa

SEQ ID NO: 106 - DNA, 1658 bp, Homo sapiens
  misc_feature: ZW10 interactor
ggcacgagctcggctcctggaaagatggaggcagcggagacagaggcggaagctgcagccctagaggtcctggctgaggtggcaggcatcttggaacctgtaggcctgcaggaggaggcagaactgccagccaagatcctggttgagtttgtggtggactctcagaagaaagacaagctgctctgcagccagcttcaggtagcggatttcctgcagaacatcctggctcaggaggacactgctaagggtctcgaccccttggcttctgaagacacgagccgacagaaggcaattgcagctaaggaacaatggaaagagctgaaggccacctacagggagcacgtagaggccatcaaaattggcctcaccaaggccctgactcagatggaggaagcccagaggaaacggacacaactccgggaagcctttgagcagctccaggccaagaaacaaatggccatggagaaacgcagagcagtccagaaccagtggcagctacaacaggagaagcatctgcagcatctggcggaggtttctgcagaggtgagggagcgtaagacagggactcagcaggagcttgacggggtgtttcagaaacttggaaacctgaagcagcaggcagaacaggagcgggacaagctgcagaggtatcagaccttcctccagcttctgtataccctgcagggtaagctgttgttccctgaggctgaggctgaggcagagaatcttccagatgataaaccccagcagccgactcgaccccaggagcagagtacaggagacaccatggggagagaccctggtgtgtccttcaaggctgttggtctacaacctgctggagatgtaaatttgccatgacttcctggaggacagcagcatggagaaagatcctagaaaaggcctctgacttccctcacctcccaaccatcattacaggaaagactgtgaactcctgagttcagcttgatttctgactacatcccagcaagctctggcatctgtggattaaaatccctggatctctctcagttgtgtatttgttcatcttcatatgctggcaggaacaactattaatacagatactcagaagccaataacatgacaggagctgggactggtttgaacacagggtgtgcagatggggagggggtactggccttgggcctcctatgatgcagacatggtgaatttaattcaaggaggaggagaatgttttaggcaggtggttatatgtgggaagataattttattcatggatccaaatgtttgttgagtcctttctttgtgctaaggttcttgcggtgaaccagaattataacagtgagctcatctgactgttttaggatgtacagcctagtgttaacattcttggtatctttttgtgccttatctaaaacatttctcgatcactggtttcagatgttcatttattatattcttttcaaagattcagagattggcttttgtcatccactattgtatgttttgtttcattgacctctagtgataccttgatctttcccactttctgttttcggattggagaagatgtaccttttttgtcaactcttacttttatcagatgatcaactcacgtatttggatctttatttgttttctcaaataaatatttaaggttaaaaaaaaaaaaaaaaaaa

SEQ ID NO: 107 - DNA, 2203 bp, Homo sapiens
  misc_feature: thyroid hormone receptor interactor 13
cggcggccgcgccctggttgggtccccactgctctcgggggcgccatggacgaggccgtgggcgacctgaagcaggcgcttccctgtgtggccgagtcgccaacggtccacgtggaggtgcatcagcgcggcagcagcactgcaaagaaagaagacataaacctgagtgttagaaagctactcaacagacataatattgtgtttggtgattacacatggactgagtttgatgaaccttttttgaccagaaatgtgcagtctgtgtctattattgacacagaattaaaggttaaagactcacagcccatcgatttgagtgcatgcactgttgcacttcacattttccagctgaatgaagatggccccagcagtgaaaatctggaggaagagacagaaaacataattgcagcaaatcactgggttctacctgcagctgaattccatgggctttgggacagcttggtatacgatgtggaagtcaaatcccatctcctcgattatgtgatgacaactttactgttttcagacaagaacgtcaacagcaacctcatcacctggaaccgggtggtgctgctccacggtcctcctggcactggaaaaacatccctgtgtaaagcgttagcccagaaattgacaattagactttcaagcaggtaccgatatggccaattaattgaaataaacagccacagcctcttttctaagtggttttcggaaagtggcaagctggtaaccaagatgtttcagaagattcaggatttgattgatgataaagacgccctggtgttcgtgctgattgatgaggtggagagtctcacagccgcccgaaatgcctgcagggcgggcaccgagccatcagatgccatccgcgtggtcaatgctgtcttgacccaaattgatcagattaaaaggcattccaatgttgtgattctgaccacttctaacatcaccgagaagatcgacgtggccttcgtggacagggctgacatcaagcagtacattgggccaccctctgcagcagccatcttcaaaatctacctctcttgtttggaagaactgatgaagtgtcagatcatataccctcgccagcagctgctgaccctccgagagctagagatgattggcttcattgaaaacaacgtgtcaaaattgagccttcttttgaatgacatttcaaggaagagcgagggcctcagcggccgggtcctgagaaaactcccctttctggctcatgcgctgtatgtccaggcccccaccgtcaccatagaggggttcctccaggccctgtctctggcagtggacaagcagtttgaagagagaaagaagcttgcagcttacatctgatcctgggcttccccatctggtgcttttcccatggagaacacacaaccagtaagtgaggttgccccacacagccgtctcccagggaatcccttctgcaaaccaaacgttacttagactgcaagctagaaagccaccaaggccaggctttgttaaaagaagtgtattctatttatgttgttttaaaatgcatactgagagacaaacatcttgtcattttcactgtttgtaaaagataattcagattgtttgtctccttgtgaagaaccatcgaaacctgtttgttcccagcccacccccagtggatgggatgcataatgccagcaagttttgtttaacagcaaaaaaggaagattaatgcaggtgttatagaagccagaagagaaactgtgtcaccctaaagaagcatataatcatagcattaaaaatgcacacattactccaggtggaaggtggcaattgctttctgatatcagctcgtttgatttagtgcaaaaatgttttcaagactatttaatggatgtaaaaaagcctatttctacattataccaactgagaaaaaaatggtcggtaaagtgttctttcataataaataatcaagacatggtcccatttgcaggaaaagtgcagactctgagtgttccagggaaacacatgctggacatcccttgtaacccggtatgggcgcccctgcattgctgggatgtttctgcccacggttttgtttgtgcaataacgttatcacatttctaatgaggattcacattaatataatataaaataaataggtcagttactggtctctttctgccgaatgttatgttttgcttttatctcacagtaaaataaatataattaaaaa

SEQ ID NO: 108 - DNA, 2526 bp, Homo sapiens
  misc_feature: CCAAT/enhancer binding protein (C/EBP), alpha
tataaaagctgggccggcgcgggccgggccattcgcgacccggaggtgcgcgggcgcgggcgagcagggtctccgggtgggcggcgcgacgccccgcgcaggctggaggccgccgaggctcgccatgccgggagaactctaactcccccatggagtcggccgacttctacgaggcggagccgcggcccccgatgagcagccacctgcagagccccccgcacgcgcccagcagcgccgccttcggctttccccggggcgcgggccccgcgcagcctcccgccccacctgccgccccggagccgctgggcggcatctgcgagcacgagacgtccatcgacatcagcgcctacatcgacccggccgccttcaacgacgagttcctggccgacctgttccagcacagccggcagcaggagaaggccaaggcggcgtgggcccacggcggcggcggcggcggcgactttgactacccgggcgcgcccgcgggccccggcggcgccgtcatgcccgggggagcgcacgggcccccgcccggctacggctgcgcggccgccggctacctggacggcaggctggagcccctgtacgagcgcgtcggggcgccggcgctgcggccgctggtgatcaagcaggagccccgcgaggaggatgaagccaagcagctggcgctggccggcctcttcccttaccagccgccgccgccgccgccgccctcgcacccgcacccgcacccgccgcccgcgcacctggccgccccgcacctgcagttccagatcgcgcactgcggccagaccaccatgcacctgcagcccggtcaccccacgccgccgcccactcccgtgcccagcccgcaccccgcgcccgccgtcggtgccgccggcctgccggccctggcgagcgcgctcaaggggctgggcgccgcgcaccccgacctccgcgcgagtggcggcagcggcgcgggcaaggccaagaagtcggtggacaagaacagcaacgagtaccgggtgcggcgcgagcgcaacaacatcgcggtgcgcaagagccgcgacaaggccaagcagcgcaacgtggagacgcagcagaaggtgctggagctgaccagtgacaatgaccgcctgcgcaagcgggtggaacagctgagccgcgaactggacacgctgcggggcatcttccgccagctgccagagagctccttggtcaaggccatgggcaactgcgcgtgaggcgcgcggctgtgggaccgccctgggccagcctccggcggggacccagggagtggtttggggtcgccggatctcgaggcttgcccagaccgtgcgagccaggactaggagattccggtgcctcctgaaagcctggcctgctccgcgtgtcccctcccttcctctgcgccggacttggtgcgtctaagatgagggggccaggcggtggcttctccctgcgaggaggggagaattcttggggctgagctgggagcccggcaactctagtatttaggataacttgtgccttggaaatgcaaactcaccgctccaatgcctactgagtagggggagcaaatcgtgccttgtcattttatttggaggtttcctgcctccttcccgaggctacagcagacccccatgagagaaggaggggagcaggcccgtggaggaggggggctcagggagctgagatcccgacaagcccgccagccccagccgctcctccacgcctgtccttagaaaggggtggaaacatagggacttggggcttggaacctaaggttgttccctagttctacatgaaggtggaggtctctagttccacgcctctcccacctccctccgcacacaccccacccagcctgctataggctggctttcccttggggctggaactcactgcgatggggtcaccaggtgaccagtggagcccccaccccgagtcagaccagaaagctaggtcgtgggtcagctctgaggatgtatacccctggtgggagagggagacctagagatctggctgtggggcgggcatggggggtgaagggccactgggaccctcagccttgtttgtactgtatgccttcagcattgcctaggaacacgaagcacgatcagtccatccagagggaccggagttatgacaagcttcccaaatattttgctttatcagccgatatcaacacttgtatctggcctctgtgcccagcagtgccttgtgcaatgtgaatgtaccgtctctgctaaaccaccattttatttggttttgttttgtttggttttctcggatacttgccaaaatgagactctccgtcggcagctgggggaagggtctgagactctctttccttttggttttgggattacttttgatcctgggggaccaatgaggtgaggggggttctcctttgccctcagctttcccagccctccggcctgggctgcccacaaggcttctcccccagaggccctggctcctggtcgggaagggaggtgcctcccgccaacgcatcactggggctgggagcagggaagggaattc

SEQ ID NO: 109 - DNA, 2820 bp, Homo sapiens
  misc_feature: serine/threonine kinase 3 (STE20 homolog, yeast)
ccgcggagttacgggaaagttggtccgagttcccagagtttccctctgtggtgccctaggcttcggcccggtgccccggctcctttcctcctttcggccttcgccgtccaccaggtccctctctctgtcccggccgccatggagcagccgccggcgcctaagagtaaactaaaaaagctgagtgaagacagtttgactaagcagcctgaagaagtttttgatgtattagagaagcttggagaagggtcttatggaagtgtatttaaagcaatacacaaggaatccggtcaagttgtcgcaattaaacaagtacctgttgaatcagatcttcaggaaataatcaaagaaatttccataatgcagcaatgtgacagcccatatgttgtaaagtactatggcagttattttaagaatacagacctctggattgttatggagtactgtggcgctggctctgtctcagacataattagattacgaaacaagacattaatagaagatgaaattgcaaccattcttaaatctacattgaaaggactagaatatttgcactttatgagaaaaatacacagagatataaaagctggaaatattctcctcaatacagaaggacatgcaaaattggcagattttggagtggctggtcagttaacagatacaatggcaaaacgcaatactgtaataggaactccattttggatggctcctgaggtgattcaagaaataggctataactgtgtggccgacatctggtcccttggcattacttctatagaaatggctgaaggaaaacctccttatgctgatatacatccaatgagggctatttttatgattcccacaaatccaccaccaacattcagaaagccagaactttggtccgatgatttcaccgattttgttaaaaagtgtttggtgaagaatcctgagcagagagctactgcaacacaacttttacagcatccttttatcaagaatgccaaacctgtatcaatattaagagacctgatcacagaagctatggagatcaaagctaaaagacatgacgaacagcaacgagaattggaagaggaagaagaaaattcggatgaagatgagctggattcccacaccatggtgaagactagtgtgggagagtgtggcaccatgcgggccacaagcacgatgagtgaaggggcccagaccatgattgaacataatagcacgatgttggaatccgacttggggaccatggtgataaacagtgaggatgaggaagaagaagatggaactatgaaaagaaatgcaacctcaccacaagtacaaagaccatctttcatggactactttgataagcaagacttcaagaataagagtcacgaaaactgtaatcagaacatgcatgaacccttccctatgtccaaaaacgtttttcctgataactggaaagttcctcaagatggagactttgactttttgaaaaatctaagtttagaagaactacagatgcggttaaaagcactggaccccatgatggaacgggagatagaagaacttcgtcagagatacactgcgaaaagacagcccattctggatgcgatggatgcaaagaaaagaaggcagcaaaacttttgagtctaatttcctctctgtttttaactattctggagaccaagaaaccactaggaattgaaggaatatttggatatttttaatcctaagattttgccctacaattaggcagaggtcaaaaagtgacaatggtacatgcccaggtaaattcccaaaaggcagaattgacagttgtatctgctgtgcattcactctaagatgaggagaacaaaagaagtgtattctcttgttctgtcagctgcataccagtaataaaactgttatgaaatggattttcaaggtctctaaaccttgaaaatccaaaggctattgttgcattgtacagcactgaaagggctttatgttacaatattctttattcctatctagtatactaggctatttattgtccccttaggtaaacttatttatttatgctattttggctttgtttcattttttaaggacaagatcaggatagctttggtgaaggtagggtcatattaatatgatgataatgtgcaaccaatttatactttctgcagggagctatggggtacattccttgatttccaggatagtttttcaaataggaaagcaataatggcagtagttctcaaatgggctaggccttttttatattgaagcaataattccatttttaccctttgaaattttgtttttttgatttttgatgtttggtacaaatagaactatatatatttaggtaaaatagatctatcgtgtttaaaaccaaagaaatcaatggaacccttgcacaaaaaagtgtgataaatatttttaaataaaaacttaatacaaatgtaatttgttaatattgtttcatgttttatgtgtagatctaatagctgaactgattcaaactgtaataagctcatcaatttcatttctatgaaaatgtgctctgttgtcacaggatgtttctgttgattttattcatttcctgggaattggtaaacatcatgttcctgatgataacccagtagcaaaaacatttgtactgagtggtacaagccttggggactgaaaaaaaaaaaagattaaaaccattaaaaagaaactcatttttacgctgaatgaacatttatatgattgcattgggaccagtcatttcctaagctacatatggccatcttgacagtgttttttcttttgtgtgtttaattattatgtgtaaatcataaagacaaataaatttcactgtgccac

SEQ ID NO: 110 - DNA, 10709 bp, Homo sapiens
  misc_feature: hypothetical protein CG003
agggggcggcgctcccggcccatcccttagccccgcggcggccgtgtgggccggaggctgcctgcaccgcgtcagggaggccggcctagaaaccctccctcccagaagaaagccgatcccagttcaggtggggtcttcctcggttgcgtacctggctggagccgagctggtgggcggccggcagccggcgtttctggtgatgacagccccgaaatgaaagcagcgcggccgccgcctccgagggctgcagggagatcagcgtccagcaaataagaagcaagtcctggacccggaggaggaggagcggccgagcatctctctctgctccgccgtgtcctttagatgagcactcccggccggagccggaggtggatccgcagagctgcctctgggcgcctgaccccgcgctgacatcacaacctgtgacaggcgcatcacgcccggtacctgctcccggccgctgcccgtcctcccagcctctttgtatgccgcagacatggccagccagcaggattcgggcttctttgagatcagtatcaaatatttactgaaatcctggagtaatacttctcccgttggcaacggttacatcaagcctccggttccacctgcttctggcacgcacagggagaaagggccgccaaccatgctacccatcaatgtggacccagacagtaaaccaggagaatatgtcctcaaaagtttatttgtcaacttcaccactcaggctgaacgcaagattcgtatcattatggcagagcccctggaaaagccattgacgaaatctctgcaacgtggagaagacccccaatttgatcaggtcatcagctcaatgagctccctttctgagtactgcctgccttccattctacgtacattatttgactggtataaaaggcaaaatggcattgaggatgaatcacatgaatacagaccaagaacaagcaataaatcaaaaagcgatgaacaacagcgagattatttaatggaaagacgggacctcgccattgattttattttttctttagtattaatagaagttttgaaacagattccacttcatcctgtaatagacagtttaatacatgatgttattaacttggctttcaagcactttaaatacaaagaagggtaccttggtcccaacactggcaatatgcatattgtggcagacctgtatgcagaagtcattggagtgttggcacaagccaaattccctgctgtaaagaagaaatttatggcggagctaaaagaattacggcacaaagagcagaacccatatgtggttcaaagcattatcagcttaataatgggcatgaaattctttcgaattaagatgtatccagtggaggattttgaggcctctcttcagtttatgcaggaatgtgcacattacttcctcgaggtcaaagacaaagatatcaagcatgccttggctgggctttttgttgaaatacttgttccagttgctgctgctgttaaaaatgaagtaaatgttccctgccttagaaattttgtggaaagcctgtatgacaccacgctggaactttcttctcgaaagaagcattccttggccttgtaccccctggtgacctgtttgctctgtgtcagtcagaagcagctgttcctgaacaggtggcacattttcctcaacaactgcttgtccaaccttaaaaacaaagatcccaagatggctcgagttgcactggaatctctctacagattactttgggtttacatgattcgaattaaatgtgaaagcaacacagctactcagagccgacttataaccatcatcacaacacttttccccaaagggtcccgcggtgtggtaccaagggacatgcctctgaacatctttgtgaaaatcatccagttcattgcccaggaacgtttagattttgcaatgaaagaaatcattttcgattttctttgtgtgggaaaaccagcaaaagcattcagtctcaacccagagagaatgaacattggtttacgggcattcttggtcatagctgatagcttgcagcagaaagatggggaacctcccatgccggttacaggagccgttcttccttcaggaaacacgttaagagtaaagaaaacatatttgagtaaaacactaactgaagaggaagccaaaatgataggcatgtccttatattactctcaagtacgaaaagctgtagacaacattttaaggcaccttgataaagaagtaggaaggtgtatgatgctgactaatgtacagatgttaaacaaagaaccggaagacatgatcacgggtgagagaaagccaaaaatagatcttttcaggacctgtgttgctgctattcctcgactgcttcctgatgggatgtcaaaacttgaacttattgacttactggctaggctctctattcatatggatgatgaattgcgacatattgcacaaaattctcttcagggtttacttgttgacttctcagattggagggaagatgtactatttggctttaccaacttcctgctccgggaagtaaatgatatgcatcacacactccttgattcgtccctgaagttgctgctgcagctgctcacccagtggaaactagtcatccagacacaaggaaaagtctatgaacaagccaacaaaatcagaaattcagagctcatcgcaaatggctccagtcacagaattcagtcggaacgaggtccccactgcagtgtactccacgctgtagaaggttttgctctggttttactctgcagtttccaggtggccacacgcaaactgtccgttttaatactcaaggaaattcgagcgttgtttattgccctggggcagcctgaggatgacgacaggccgatgattgatgtcatggatcagctaagttcttccattctagaaagttttattcatgtagcagtttcggattcagcaacattaccactcacccacaatgtggatctgcagtggttggtggaatggaacgcagtcctggtcaatagccattatgatgtgaaaagcccttcccatgtctggatatttgcacagtctgtcaaagacccctgggtcctctgcctcttcagcttcctccggcaggagaacttacccaagcactgccccacagccctcagctatgcctggccttatgccttcactcggctccagtcggtgatgcctctggtggacccaaatagcccaattaatgccaagaaaaccagcactgccggcagcggagacaactatgttactttgtggagaaattacctaattctttgttttggagttgcaaaacccagtattatgagcccaggacacttaagagcttccactccagaaataatggcgaccacacctgatggtacagtgagctacgataacaaggccataggcaccccatcggtgggagttctgttaaagcagttggtgcctttgatgagactagagagcattgagatcacagagtccttagttttaggatttggaagaacaaattcccttgttttcagagaattggtagaagaacttcatccattaatgaaagaagctctggaaagaagaccagagaacaagaaacgccgagaacggcgagacttgttaaggctacaactacttcgaatttttgaacttttggctgatgctggtgtaataagtgacagcacaaatggagccctagagcgggatactttagccctgggagctttgttcttagaatatgtggacttgacccgcatgctcctagaagctgaaaatgacaaagaagttgaaattcttaaagatatccgggcacattttagtgcaatggtggccaacttgattcagtgtgttccagttcaccaccgaagatttctcttcccccagcaaagtctgaggcaccaccttttcatcttattcagccagtgggcaggacccttcagcattatgttcactcctctggatcgttacagtgacagaaatcatcagattacaagatatcagtattgtgcattaaaagcaatgtcagcagtactgtgctgtggccctgtctttgacaatgtgggcctttccccagatggctacctatataaatggcttgacaacattctggcttgtcaagatttacgagttcatcaacttggctgcgaagttgttgtcttgctactggaacttaatcctgaccaaataaatctttttaactgggcaattgaccgatgctacacaggttcctaccaacttgcatctggctgcttcaaagccatagcaactgtgtgtggaagcaggaactatcccttcgacatagtgacattgttaaaccttgttctattcaaggcctctgacaccaacagagagatttatgaaatctccatgcagctcatgcagatccttgaagcaaagctttttgtatactcaaagaaagtcgctgagcaaagaccgggaagtattctctatggaacacacggcccgctgccacccctctacagcgtgtcactcgccctcttgtcatgtgagctggccaggatgtaccctgagctcacactccccctcttctcaggtaagccagcgattccccacaacacaccccaacgggcgccagatcatgcttacctacctgctgccctggctgcacaacatcgagctggtggacagcaggctcctcctcccgggtcgagccccagcagcccagaggacgaagtcaaggaccgggaaggtgacgtgactgcttctcacgggctgagaggaaatggctggggctctccagaagccacgtcactggtcctgaacaacctcatgtacatgacggccaagtatggagatgaagttcctgggccagaaatggaaaatgcttggaatgctttagccaacaatgagaaatggagcaacaacctgaggatcaccttgcagttcctgattagcctctgtggggtcagcagcgacacagttctcctaccctatattaaaaaagtggcaatatacttgtgccgtaacaacaccattcaaaccatggaagagcttctctttgagctgcagcagacagaacccgtgaaccccatcgtccagcattgtgacaacccgcccttctaccgcttcacggccagtagcaaggcttccgcagcagcctcaggaaccacctctagcagcaatacagtggttgctggccaggaaaatttcccagatgctgaggagaacaagatattgaaagaatctgatgaaaggtttagtaatgtcatcagagcccacactcgcctcgagtcaagatacagcaatagctctggaggatcctacgatgaagataaaaatgatccaatttctccctacacgggctggttgctgactattacagagaccaagcagccgcagcccttaccgatgccttgtactggaggatgctgggcccccctggttgactatctcccggagaccatcactccccgggggccactccacaggtgcaatattgctgtaatttttatgactgaaatggtggtggatcacagtgtacgagaagactgggcgcttcatctaccattattacttcatgctgtcttcttaggtttagaccactaccggcctgaagtctttgaacacagcaaaaaactgcttcttcacctcttgattgccctctcttgcaacagcaatttccattccattgcttccgtgctcctgcagacccgagagatgggtgaagctaagactctaaccgtgcagccagcctaccaacctgaatatctctatacaggtggctttgacttcctgagagaggaccagtcatccccggtgcctgactcagggcttagttcaagctccacctcctctagcatcagtctgggaggcagcagtggaaacctcccacagatgacccaggaggtagaagatgtggacacagctgctgaaacagatgagaaggcaaacaagctcattgagtttctcacgaccagggcatttggtccactttggtgccatgaagacatcacacctaaaaatcaaaattcaaagagtgctgaacagctcactaattttctacgtcacgttgtatctgtatttaaagattccaaatcaggcttccatctggagcaccagttgagtgaagttgcattgcagacagccctcgcaagctcttcaaggcactatgctggtcggtccttccagatattccgggccctcaagcaacctctgtcagcacatgccttatctgaccttctctcaagattggtggaggtgataggagaacatggagatgagattcagggttatgtaatggaagcgctcctaaccttggaggcggctgtggataacttgtctgactgcttgaagaacagtgacctcctaactgtattgtcccgctcttcctcaccagatttaagctccagcagtaaactaacagcaagcagaaagagcacaggacaactaaacatgaacccgggaaccaccagcggcaacaccgcaactgccgaacggagccggcatcaacgaagcttctctgtgcccaagaagtttggtgtcatcgaccgatcctctgacccacctcgaagtgccacactggacagaattcaggcttgtacccaacaaggcctctcctcaaaaaccagaagctcatcctccttgaaggacagtctcacggacccatcccacataaaccatcccaccaacctgctggccaccatattctgggtcacagtggccttgatggagtctgattttgagtttgaatacttaatggccttaaggctgttgagcagactactggcacatatgccactcgataaggctgagaaccgagaaaagcttgagaaactccaggcacagctgaagtgggccgacttctccgggctgcagcagctgctgctgaaaggattcacatccctcaccaccacagacctgaccctgcagctcttcagtctgctgacaccagtgtccaaaatatccatggtggatgcatcccacgctattgggtttccactgaatgtcttgtgtctcctgcctcagctgattcagcattttgaaaatcccaatcagttctgtaaggatatagccgaaaggattgctcaggtttgtttagaagagaagaaccccaaactttcaaatcttgcacatgtcatgactctttataaaacgcacagctacacgagggactgtgccacgtgggtcaatgtggtctgtcgataccttcatgaagcatatgctgacattaccttgaatatggttacctacctggcagagctgctggagaagggcctccctagtgtgcagcagcccctgctccaggtgatctacagtcttctcagctacatggacctttctgtcgttcctgtcaaacagttcaatgtggaagttctgaagacaattgaaaaatatgtgcaaagtgttcactggagagaagctctgaatatcttgaagctggtagtttctcggtcagccagccttgttttaccttcataccagcacagtgacctctcaaaaatagaaatacatcgagtgtggactagtgcttccaaggaattacctgggaaaaccctggacttccacttcgatatttcggagactccaatcatcgggaggcggtatgatgagctgcagaattcttctgggcgtgatgggaagcccagggccatggccgtcacccggagcacatcttccacttcctcaggctccaactccaacgtccttgttccagtgagctggaaaaggccccagtattctcagaagagaacaaaagagaagttggtacatgtcctttctctgtgtggccaagaagtaggattgagcaaaaatccatcagtgattttttcatcgtgtggggatctggatctgcttgagcaccagacaagcttggtatcttctgaggacggtgcccgagagcaggagaacatggatgacacaaacagcgagcagcagtttagagtcttcagagacttcgacttcctagatgtggagctggaggatggagagggtgagagtatggacaatttcaactggggagtgcgcagacgttctctggacagcctggataagtgtgatatgcagattctggaggagcgccaactgtcaggaagcactcctagcctgaataaaatgcaccatgaggactccgatgaatcatccgaggaggaggacctcacagccagccagatcctggagcactcagacctaatcatgactctctccccctctgaagagacgaatcccatggagctgctcaccacagcctgtgactcgacccctgcagaacctcattcctttaacaccagaatgtccagctttgatgcttccttgcctgatatgaataatctgcagatttctgagggttcaaaggctgaagctgttcgtgaggaggaggacaccaccgtgcatgaggatgatctttctagttccatcaatgaactcccagcagcttttgaatgcagcgacagctttagcctggacatgactgagggggaagaaaaaggcaatcgggcactggaccagtttaccctggcgagctttggagaaggtgacaggggagtctctccccctccctcgcccttcttctcagccatccttgccgcctttcagcccgcagcctgtgacgatgccgaggaggcctggcgcagccacatcaaccagcttatgtgtgactcagatggctcctgtgctgtgtatacatttcatgtgttctcctccttgtttaagaatattcagaaaaggttctgcttcctaacctgtgatgcagccagttaccttggagataacctccggggaatcggatccaaatttgtcagctcttcccagatgctcacctcctgctctgaatgtcctacactttttgtggatgccgagactctcctttcatgtggacttctggacaagctcaagttcagtgtgttagaactgcaagaatatttggatacctacaacaacaggaaagaggccacactctcttggcttgcaaattgtaaggcaacatttgcagggggatcaagagatggagtaattacctgtcaaccaggggactccgaagaaaagcaattggaactgtgtcagagattatataagctacacttccagctgctattgctttttcagtcctactgtaagctcatcggccaggtgcacgaagttagctccatgccagagctgctgaatatgtccagggaactgagtgacctaaagaaacacctgaaggaagccagtgcagtcattgcagctgaccctctctattcagacggcgcgtggtccgagcccaccttcacgtccactgaagcagccatccagtccatgctggagtgcctgaagaacaacgaactcggcaaagctttgcggcagatcagggagtgcagaagtctgtggcccaatgacatctttggaagcagttctgatgatgaggtccagacactactgaatatttatttccgtcaccaaactctgggacagacgggtacttatgccctggtggggtctaaccagagcctgaccgagatctgcaccaagctgatggagctgaacatggagatccgggacatgatccgcagggcccagagttaccgagtcctcactacttttcttccagactccagtgtttctggcactagtctctgacaggagcctcctgtccccactgggttccaaactgcagtgctgccatgctggggcaacgtcattcagtgtcttctcggccttcaaaaggcttggacagactgttctccctcttgttacctgtagggctttttctaaagaggatggcagaacttccaacgtgtagcaatactataagaaccaaggtagcttagaacgtcctggacagactccactcatcatgctgtgtggcacaaatgtgttacatttgaccgagcatatgcaactcgctactgaagaagtgacttccgttgcataccaaagccgactacactgaacagtaccttcctttctagaaacaattttagattggcaaaagtgcaatgttttcttcactcaaaaaattttatattctcaaacatgtatattctttccctgtcttgttccattttcttttcttttttcttttttctttttcctttctttcgtgggctgagaaaggggcaggcaaaatgaagctggccactgaaaactgtaagatggtcaaaagctgacagcctgtgtatgtgaaaagggaattgtaaatggactgcaatgtaatgtacactgtaatttgaatacaattactgtatctaaaaggagctgctatgaagtacctttcttatgttgctaggctactgtttctgaaagccctggatctctttgcaccaaaaatggtccagatagactctttttaaggatcttggctgctttttactagaaggttgcttttatgagcatatttatactgctgaaggatgagtgttaattttaattaactttgccgttttgtagagaaaactattcacaagataaattccaagtcttttcacctgtcaggcatgcatattttaatatctgtttggatagtcagaagtagaatcataaaggtaaaatatgagttgttactttgtttcttcgatgtcatattttatgtgtaatatatatgtaaagggccattcttaagttctctccttaaacttaatgctgtcaagtgttagatgtgtgcatgtgaacttgttgcactgcagaaacatattcagagtttatctatgtaacttattcactctgtaaatacatttaaagtttttgtgatgtaagcttaattgatattctgttcagaactttctttagactaaaaaaaaaaaaaaaagacaaa

SEQ ID NO: 111 - DNA, 2253 bp, Homo sapiens
  misc_feature: serine/threonine kinase 6
ggaagacttgggtccttgggtcgcaggtgggagccgacgggtgggtagaccgtgggggatatctcagtggcggacgaggacggcggggacaaggggcggctggtcggagtggcggagcgtcaagtcccctgtcggttcctccgtccctgagtgtccttggcgctgccttgtgcccgcccagcgcctttgcatccgctcctgggcaccgaggcgccctgtaggatactgcttgttacttattacagctagaggcatcatggaccgatctaaagaaaactgcatttcaggacctgttaaggctacagctccagttggaggtccaaaacgtgttctcgtgactcagcaaattccttgtcagaatccattacctgtaaatagtggccaggctcagcgggtcttgtgtccttcaaattcttcccagcgcgttcctttgcaagcacaaaagcttgtctccagtcacaagccggttcagaatcagaagcagaagcaattgcaggcaaccagtgtacctcatcctgtctccaggccactgaataacacccaaaagagcaagcagcccctgccatcggcacctgaaaataatcctgaggaggaactggcatcaaaacagaaaaatgaagaatcaaaaaagaggcagtgggctttggaagactttgaaattggtcgccctctgggtaaaggaaagtttggtaatgtttatttggcaagagaaaagcaaagcaagtttattctggctcttaaagtgttatttaaagctcagctggagaaagccggagtggagcatcagctcagaagagaagtagaaatacagtcccaccttcggcatcctaatattcttagactgtatggttatttccatgatgctaccagagtctacctaattctggaatatgcaccacttggaacagtttatagagaacttcagaaactttcaaagtttgatgagcagagaactgctacttatataacagaattggcaaatgccctgtcttactgtcattcgaagagagttattcatagagacattaagccagagaacttacttcttggatcagctggagagcttaaaattgcagattttgggtggtcagtacatgctccatcttccaggaggaccactctctgtggcaccctggactacctgccccctgaaatgattgaaggtcggatgcatgatgagaaggtggatctctggagccttggagttctttgctatgaatttttagttgggaagcctccttttgaggcaaacacataccaagagacctacaaaagaatatcacgggttgaattcacattccctgactttgtaacagagggagccagggacctcatttcaagactgttgaagcataatcccagccagaggccaatgctcagagaagtacttgaacacccctggatcacagcaaattcatcaaaaccatcaaattgccaaaacaaagaatcagctagcaaacagtcttaggaatcgtgcagggggagaaatccttgagccagggctgccatataacctgacaggaacatgctactgaagtttattttaccattgactgctgccctcaatctagaacgctacacaagaaatatttgttttactcagcaggtgtgccttaacctccctattcagaaagctccacatcaataaacatgacactctgaagtgaaagtagccacgagaattgtgctacttatactggttcataatctggaggcaaggttcgactgcagccgccccgtcagcctgtgctaggcatggtgtcttcacaggaggcaaatccagagcctggctgtggggaaagtgaccactctgccctgaccccgatcagttaaggagctgtgcaataaccttcctagtacctgagtgagtgtgtaacttattgggttggcgaagcctggtaaagctgttggaatgagtatgtgattctttttaagtatgaaaataaagatatatgtacagacttgtattttttctctggtggcattcctttaggaatgctgtgtgtctgtccggcaccccggtaggcctgattgggtttctagtcctccttaaccacttatctcccatatgagagtgtgaaaaataggaacacgtgctctacctccatttagggatttgcttgggatacagaagaggccatgtgtctcagagctgttaagggcttatttttttaaaacattggagtcatagcatgtgtgtaaactttaaatatgcaaataaataagtatctatgtctaaaaaaaaaaaaaaaa

SEQ ID NO: 112 - DNA, 1667 bp, Homo sapiens
  misc_feature: histamine N-methyltransferase
ttaatacttctatttcttacaaaacaaccgtataggggttaaagtatcagtgcaaagtcccgttcaaatattgactcagtaatgagctctacaagccagcctttgtggcatgttaaattcaaaacaagcttagcatttttttttttttttggatagaaactggtgggggtggggaaagaaagagggaactgggaagagaaggaggggaacttaaaccttgcttcctgctctgtctttctcagaaaaccaaatatggcatcttccatgaggagcttgttttctgaccacgggaaatatgttgaatctttccggaggtttctcaaccattccacggaacaccagtgcatgcaggaattcatggacaagaagctgccaggcataataggaaggattggagacacaaaatcagaaattaagattctaagcataggcggaggtgcaggtgaaattgatcttcaaattctctccaaagttcaggctcaatacccaggagtttgtatcaacaatgaagttgttgagccaagtgctgaacaaattgccaaatacaaagagcttgtagccaagacatcgaacctcgagaacgtaaagtttgcttggcataaggagacatcatctgaataccaaagtagaatgttggagaaaaaggagcttcaaaagtgggactttattcatatgattcaaatgctgtattatgtaaaagacatcccagctaccctgaaattcttccatagtctcttaggtaccaatgctaagatgctcattattgttgtgtcaggaagcagtggctgggacaagctgtggaaaaagtacggatcacgctttccccaggatgacctctgccagtatatcacatcagatgacctcactcagatgctggacaacctagggcttaagtatgagtgctatgaccttttgtccaccatggatatatctgactgctttattgatggtaatgaaaatggagacctgctttgggattttttgactgaaacctgcaactttaatgccacagcaccacctgatctcagagcagagcttgggaaagatctacaagagcctgaatttagtgctaagaaagaggggaaggttctttttaataatactctgagtttcatagtgattgaggcataactatcaatcacaaaagtatattcaaaaattatattttgaacaactcgaatcactcatttgtttccatattaaaatcacaaactcatccattaatgtagataaagcactgtttggatatgagatgtagcaaattccaatacattattggacttccatttggaatcatatgggatactgctggtcttatcctgtccctcctccaggtagagagaccacatgcaggctcaacataacataagctagaaaaattagatgactgaatttctatggcatattgataataaaattcattccatttgctgattgtctgaaattttctagaatactaataaaatacatactatagattctttattagtgaagtatgcactaatcaatactttgaacacaaagcctgtgttactgatttggccgttttgtgaagaaacatttatctttgtacgttcttctattgtgctttctatctaatttttattaatttgtaagagtaagcacctttagaatattaaaaattaattctttatcacatgttgtca

SEQ ID NO: 113 - DNA, 604 bp, Homo sapiens
  misc_feature: TYRO protein tyrosine kinase binding protein
ccacgcgtccgcgctgcgccacatcccaccggcccttacactgtggtgtccagcagcatccggcttcatggggggacttgaaccctgcagcaggctcctgctcctgcctctcctgctggctgtaagtggtctccgtcctgtccaggcccaggcccagagcgattgcagttgctctacggtgagcccgggcgtgctggcagggatcgtgatgggagacctggtgctgacagtgctcattgccctggccgtgtacttcctgggccggctggtccctcgggggcgaggggctgcggaggcagcgacccggaaacagcgtatcactgagaccgagtcgccttatcaggagctccagggtcagaggtcggatgtctacagcgacctcaacacacagaggccgtattacaaatgagcccgaatcatgacagtcagcaacatgatacctggatccagccattcctgaagcccaccctgcacctcattccaactcctaccgcgatacagacccacagagtgccatccctgagagaccagaccgctccccaatactctcctaaaataaacatgaagcacaaaaaaaaaaaaaaaaaaaaaaaaaaaaaaaaaa

SEQ ID NO: 114 - DNA, 2103 bp, Homo sapiens
  misc_feature: cyclin-dependent kinase inhibitor 2C (p18, inhibits CDK4)
ctctgccgagcctccttaaaactctgccgttaaaatgggggcgggtttttcaactcaaaaagcgctcaatttttttcttttcaaaaaaagctgatgaggtcggaaaaaagggagaagaaaccggcaccctctctgagaggcaacagaagcagcaattgtttcagcgaaaaaagcagcaagggagggagtgaaggaaaaaagcaaaaaagggggcgacacgcaagtgcctgtaggggtgaaaggagcagggaccggcgatctagggggggatcagctacaaaagaaactgtcactgggagcggtgcggccaaggaggaagcagtgctgccaggctctgctccagggcacagctggctggcggctgccctgtccgcagcaaaggggcacaggccggggaccgcgagaggtggcaaagtggcaccgggcgccgaggctgctgagcgctcgccgagacgcggaccggactggctgccccggaactgcggcgactctccctactcagaacttggcctacgtttcccaggactctccccatctccagaggcccccacaaaaccgggaaaggaaggaaaggacagcggcggcagcagctcaatgagtgcctacagcagaaagcctgaacgagctcggtcgtaggcgggaagttcccgggggctgcccagtgcagccgcaatgctgccgcgagctgccccagcagtccgggctccgtagacgctttccgcatcactctccttcctcgggctgccgggagtcccgggacctggcggggccggcatgacgggcttctcgggggcccgccgcacgcccggcagcctccggagacgcgcgccgagcccggctcccacggcctctgaggctcggcggggctgcggctgcctggcgggcgggctccggagctttcctgagccggcattagcccacggcttggcccggacgcgaccaaaggctcttctggagaagcccagagcactgggcaatcgttacgacctgtaacttgagggccaccgaactgctactcccgttcgcctttggcgatcatcttttaaccctccggagcacgtcagcatccagccaccgcggcgctctcccagcagcggaggacccaggactatcccttcggcgagacggatggaaaccgagccccctggaggacctgcccctgcagttctgcctcacacggctcaagtcaccaccgtgaacaagggaccctaaagaatggccgagccttgggggaacgagttggcgtccgcagctgccaggggggacctagagcaacttactagtttgttgcaaaataatgtaaacgtcaatgcacaaaatggatttggaaggactgcgctgcaggttatgaaacttggaaatcccgagattgccaggagactgctacttagaggtgctaatcccgatttgaaagaccgaactggtttcgctgtcattcatgatgcggccagagcaggtttcctggacactttacagactttgctggagtttcaagctgatgttaacatcgaggataatgaagggaacctgcccttgcacttggctgccaaagaaggtcacctccgggtggtggagttcctggtgaagcacacggccagcaatgtggggcatcggaaccataagggggacaccgcctgtgatttggccaggctctatgggaggaatgaggttgttagcctgatgcaggcaaacggggctgggggagccacaaatcttcaataaacgtggggagggctcccccacgttgcctctactttatcaattaactgagtagctctcctgacttttaatgtcatttgttaaaatacagttctgtcatatgttaagcagctaaattttctgaaactgcataagtgaaaatcttacaacaggtttatgaatatatttaagcaacatctttttaacctgcaaaatctgttctaacatgtaattgcagataactttgactttcttctgaatattttatctttccttggcttttcccttgcttccccttttgccaatctcaacacccaagttgaagactttgtttttaaaatggtttgtcctgatgcttttgtctaattaaaacactttcaaaacaggaaaaaaaaaaaaaaaaaa

SEQ ID NO: 115 - DNA, 627 bp, Homo sapiens
  misc_feature: CDC28 protein kinase regulatory subunit 2
agtctccggcgagttgttgcctgggctggacgtggttttgtctgctgcgcccgctcttcgcgctctcgtttcattttctgcagcgcgccacgaggatggcccacaagcagatctactactcggacaagtacttcgacgaacactacgagtaccggcatgttatgttacccagagaactttccaaacaagtacctaaaactcatctgatgtctgaagaggagtggaggagacttggtgtccaacagagtctaggctgggttcattacatgattcatgagccagaaccacatattcttctctttagacgacctcttccaaaagatcaacaaaaatgaagtttatctggggatcgtcaaatctttttcaaatttaatgtatatgtgtatataaggtagtattcagtgaatacttgagaaatgtacaaatctttcatccatacctgtgcatgagctgtattcttcacagcaacagagctcagttaaatgcaactgcaagtaggttactgtaagatgtttaagataaaagttcttccagtcagtttttctcttaagtgcctgtttgagtttactgaaacagtttacttttgttcaataaagtttgtatgttgcatttaaaaaaaaaaaaaaa

SEQ ID NO: 116 - DNA, 5475 bp, Homo sapiens
  misc_feature: BTB and CNC homology 1, basic leucine zipper transcription factor 1
tcgcccccgccgggcgctctcgcttcagtcagtcgggccgcgccgcgcctcagctctggttgatgataattagaagcatgctttccactgaacttcccgacaacatttgttatgcagaatgtctctgagtgagaactcggtttttgcctatgaatcttctgtgcatagcaccaatgttttactcagccttaatgaccagcggaagaaagatgtgctgtgcgatgtcaccatctttgtggagggacagcggttccgcgctcaccggtccgtgctggcggcatgcagcagttacttccactcaagaatcgtaggccaggctgatggagagctgaacattactcttccagaagaggtgacagttaaaggatttgaacctttaattcagtttgcctacactgctaaactgattttaagtaaagagaatgtggatgaagtgtgcaaatgtgtggagtttttaagtgtacataatattgaggaatcctgctttcagtttctgaaatttaagtttttggactccactgcagaccagcaagaatgcccaagaaaaaaatgcttttcatcacactgtcagaaaacagaccttaaactttcacttttggaccagagggatctagaaactgatgaagtggaggaatttctggaaaataaaaatgttcagactcctcagtgtaaactccgcaggtatcaaggaaatgcaaaagcctcacctcctctacaagacagtgccagtcagacatatgagtccatgtgcttagagaaggatgctgctctggccttgccttctttatgccccaaatacagaaaattccaaaaagcatttggaactgacagagtccgtactggggaatctagtgtcaaagacattcatgcttctgttcagccaaatgaaaggtctgaaaatgaatgcctgggaggagtcccggagtgtagagatttgcaggtgatgttaaaatgtgacgaaagtaaattagcaatggaacctgaagaaacgaagaaagatcctgcttctcagtgcccaactgaaaaatcagaagtgactcctttcccccacaattcttccatagaccctcatggactttattctttgtctcttttacacacatatgaccaatatggtgacttgaattttgctggtatgcaaaacacaacagtgttaacagaaaagcctttgtcaggtacagacgtccaagaaaaaacatttggtgaaagtcaggatttacctttgaaatccgacttgggcaccagggaagatagtagtgttgcatctagtgataggagtagtgtggagcgagaagtggcagaacacctagcaaaaggcttctggagtgacatttgcagcacggacactccttgccaaatgcagttatcacctgctgtggccaaagatggctcagaacagatctcacagaaacggtctgagtgtccgtggttaggtatcaggattagtgagagcccagaaccaggtcaaaggactttcacaacattaagttctgtcaactgcccttttataagtactctgagtactgaaggctgttcaagcaatttggaaattggaaacgatgattatgtttcagaaccccagcaagaaccttgcccatatgcttgtgtcattagcttgggagacgactctgagacggacaccgaaggagacagtgaatcctgttcagccagagaacaagaatgtgaggtaaaactgccattcaatgcacaacggataatttcactgtctcgaaatgattttcagtccttgttgaaaatgcacaagcttactccagaacagctggattgtatccatgatattcgaagaagaagtaaaaacagaattgctgcacagcgctgtcgcaagagaaaacttgactgtatacagaatcttgaatcagaaattgagaagctgcaaagtgaaaaggagagcttgttgaaggaaagagatcacattttgtcaactctgggcgagacaaagcagaacctaactggactttgccagaaagtttgtaaagaagcagctctgagtcaagaacaaatacagatactcgccaagtactcagctgcagattgcccactttcatttttaatttctgaaaaagataaaagtactcctgatggtgaactggcgttaccatcaattttcagtttatctgaccggcctccagcagtgctgcctccctgtgccagaggaaacagtgagcctggctacgcgcgagggcaggagtcccagcagatgtccacagccacctctgagcaagctgggcctgcggaacagtgtcgtcagagtggtgggatctcagatttctgtcagcagatgactgataaatgtactactgatgagtaaacttgcattcacttccttcaaaccatctaattttctcctgaagttttggcagcgtcttgaaagcctaatatgaccatctgttgctcaacaatactgtttttttcctttagtagtttaccacaagggaatttcctttaagtcaaccatgatttctccttgatttctacaagagacaaagaaatgattttgcctcctggatatcagaaaaatccatgtgaaaatgtagtaaacctttaaaactcatgttttaaagaataataactctagtaataactcttcctgctattcagaataagtaggagaatgaaaactgcagcatatcagacagcaatttaacagcttgaaacatctacagatagttcctactaaaagaagtggcctgcagaagtttaataatttgacttttttctaatattttagtttgaaagaaaatttcttcccaagcaatgctaatagagttctattcttagaagcagggtgtcagctactgggaatatttttgtagagctgcattgtgaaaaaaagatggtcttacctgaatcttagggctttgttcttcggctcctaaaatcaggctttaagctacattgggaagatttagtaaataggcaagtggttggcctaagacgggggctgcttctcctcttcagtatggactctagaaagtctggctacatgaatagatttaagtgtcactttccctccctgccccccgcttcagtctctaccatatctggtcccatcatggacttcctatttcctggcatttttgtccctttggaagaagaaataggactcagaatacagtggcatgagtgattacactggcagcattatctcaggctccctagaatctggagagcttaccaacatgtaaagctgttcatttttccaccgtgggtcaccaatgccagaaaaccagacatcacggggaaagaatgttgcttactttttaccaggagtgcagttcatttttttcaccctgtttttgaagtcgtattattcacttgtaaaaatgattgtaacagataaaaaatgtatctgcagcaactctgcaggtttgtgaaataggatgaaactcaatctttttctattgtgggtttgcatttgaaaagcaggttgaatccttgctctcttctccaaatttggtgtggtataaagacacacaaatcattttaacttggacatttaaagatcagtcttagtgtttgttcagtcctgttacaaaatagataactgagcacctatcgcataacattttgcggtggcttttagccatgctggggttagatgtgtttgagagtcaaatgaaagctatggatcttctcagcaattaaaaaaaatgcatatattcacattcacagaaacattggcagaacccagttttaatggtacagaggagtagtttatagtgttgatttcaccaaaatcagagggctgaaagagacacttctatagactgcatcctgagcctagtgcagggcttgtctagctaatgtgggcagccaccacccactgtgtatgaacaagtctgaagcaagttggccttgcccttgagagtatatggggaccagtcttcatgtcttggagtaatttgtcaaatgttaccctttttgatcagggtgtagggggaggatattgctagtatattttcagtggtttgtatgttctctctgtcactgacttatttgtaagagaaaattagttggacttgtttattttctagtagcttttataagtacactcaagaatttgtcagggagaataattctgatagtgcatcccatactgcaaaagaatttgtgtgtgtgtgtgtgtgtgtgtgtgtgtatgtgtatgtatacatatatatctctccatataggtatttctttgatacttgtaattttaaatttcagcttcacgatataaaataatataagaacttctggtttacaaaatgtaaaatcttaagccaatggaacccttgatttcctacctcagtgtacactcaactattggttgtatcagtttgtgtatgtgcaaatgtcaaataatcttttgctttaattgctactgtacttgctttgaaagattacctactattttatgataaaatgtagttgtctccagagcttaaatataatttgtaaagcacttggtttaaatttctctctacctataaacagtttagcattaagggtttctattaatgacacagaattattggccaagtgtaatttcttaaaatttagcattactttaaatagccagcatgtaatacaagtaactacactacctcatatctacatgattttcaagttgtaatgcagatggacagataaaaaagattttacgtttgtcttttggccataagtgggaaagttttctgtatattgcatagcattacacatttatgcctattttaacattaacttctaaagaagttttttctaagaaaatgtttcaaggcaatattttttttgaggctgccgaagacaaatgacaggattatgagtatacagtgtatgccttttccttcatgcagaattttgaaatgttttcagtttgtatattgcatattcacatgatcattgctcactattttatgaactggccttctcaatgtttgatgattttttaaaagctgttatgttgaattcagtaaaataacattaccttattttttttcttattcaaattctggaactatagcaaataattcgttaaattgtcatattcaaaacaaatgtggatacagtcttggttctccatctgtaattttttttaacagtttgctatagcttactgcttaactaattttaaataaggaaataagtatgttagatgcagtagacgatacaggttgcatgtggacactcagtcacattaacaacttgggaaaaaaatggcaatgttacggtgaattctcaggtgaacttttttcagttataaaacatctattttgaatctgtaaatattttaaatgttttattaaggcatgtaataaactattctttgaaacttgttgggtagaatgaaaattaaagccataatggtaaaagatggcatactgattataaaagaagcagaaaaacattgatttttttatatctttcataatataattttctaacaatgcaataaaaccactaaacttttgtgtc

SEQ ID NO: 117 - DNA, 1061 bp, Homo sapiens
  misc_feature: GLI pathogenesis-related 1 (glioma)
ctctgttttctcaaagctgaagtcggctaggtttgcaaagctgtgggctgagcactcaggcaatcacactctcagaaactgcggcggctctggactgcagcctcccaaggctccatgccagacaaagcatgcgtgtcacacttgctacaatagcctggatggtttcttttgtctccaattattcacacacagcaaatattttgccagatatcgaaaatgaagatttcatcaaagactgcgttcgaatccataacaagttccgatcagaggtgaaaccaacagccagtgatatgctatacatgacttgggacccagcactagcccaaattgcaaaagcatgggccagcaattgccagttttcacataatacacggctgaagccaccccacaagctgcacccaaacttcacttcactgggagagaacatctggactgggtctgtgcccattttttctgtgtcttccgccatcacaaactggtatgacgaaatccaggactatgacttcaagactcggatatgcaaaaaagtctgtggccactacactcaggttgtttgggcagatagttacaaagttggctgcgcagttcaattttgccctaaagtttctggctttgacgctctttccaatggagcacattttatatgcaactacggaccaggagggaattacccaacttggccatataagagaggagccacctgcagtgcctgccccaataatgacaagtgtttggacaatctctgtgttaaccgacagcgagaccaagtgaaacgttactactctgttgtatatccaggctggcccatatatccacgtaacagatacacttctctctttctcattgttaattcagtaattctaatactgtctgttataattaccattttggtacagctcaagtaccctaatttagttcttttggactaatacaattcaggaaagaaaaaacccaaaaaccaacctcattcacatatggcttttttttaaccaataacaattaggtgtacttctattttaaaacatttcagaaaaaaatatatgttatagcaatactcttac

SEQ ID NO: 118 - DNA, 2780 bp, Homo sapiens
  misc_feature: activator of S phase kinase
aattcggcacgagctctctgaggctgcgccaagacctgaagcggcggaccgagagcccgggtctgagactgagagagcaacggaatggaggcggggtagaggcggaaacacaacctgcagggccagagcgaggcgcgagaaggacggcggcgtgagggggcggggcgcgcagcgcgagaaggcaggcacgaggggcgagcgcgaggcggggcacggcgcgtggcgtgagacggggcggggcgcgcgtatcggcgccgcggccgcgtgacgcgttttcaaatcttcaaccgccgcagcccactcgtttgtgctttgcgccttcctcctccgcgccttggagccggatccggccccggaaacccgacctgcagacgcggtacctctactgcgtagaggccgtagctggcggaaggagagaggcggccgtcctgtcaacaggccgggggaagccgtgctttcgcggctgcccggtgcgacactttctccggacccagcatgtaggtgccgggcgactgccatgaactccggagccatgaggatccacagtaaaggacatttccagggtggaatccaagtcaaaaatgaaaaaaacagaccatctctgaaatctctgaaaactgataacaggccagaaaaatccaaatgtaagccactttggggaaaagtattttaccttgacttaccttctgtcaccatatctgaaaaacttcaaaaggacattaaggatctgggagggcgagttgaagaatttctcagcaaagatatcagttatcttatttcaaataagaaggaagctaaatttgcacaaaccttgggtcgaatttctcctgtaccaagtccagaatctgcatatactgcagaaaccacttcacctcatcccagccatgatggaagttcatttaagtcaccagacacagtgtgtttaagcagaggaaaattattagttgaaaaagctatcaaggaccatgattttattccttcaaatagtatattatcaaatgccttgtcatggggagtaaaaattcttcatattgatgacattagatactacattgaacaaaagaaaaaagagttgtatttactcaagaaatcaagtacttcagtaagagatgggggcaaaagagttggtagtggtgcacaaaaaacaagaacaggaagactcaaaaagccttttgtaaaggtggaagatatgagccaactttataggccattttatcttcagctgaccaatatgccttttataaattattctattcagaagccctgcagtccatttgatgtagacaagccatctagtatgcaaaagcaaactcaggttaaactaagaatccaaacagatggcgataagtatggtggaacctcaattcaactccagttgaaagagaagaagaaaaaaggatattgtgaatgttgcttgcagaaatatgaagatctagaaactcaccttctaagtgagcaacacagaaactttgcacagagtaaccagtatcaagttgttgatgatattgtatctaagttagtttttgactttgtggaatatgaaaaggacacacctaaaaagaaaagaataaaatacagtgttggatccctttctcctgtttctgcaagtgtcctgaaaaagactgaacaaaaggaaaaagtggaattgcaacatatttctcagaaagattgccaggaagatgatacaacagtgaaggagcagaatttcctgtataaagagacccaggaaactgaaaaaaagctcctgtttatttcagagcccatcccccacccttcaaatgaattgagagggcttaatgagaaaatgagtaataaatgttccatgttaagtacagctgaagatgacataagacagaattttacacagctacctctacataaaaacaaacaggaatgcattcttgacatttccgaacacacattaagtgaaaatgacttagaagaactaagggtagatcactataaatgtaacatacaggcatctgtacatgtttctgatttcagtacagataatagtggatctcaaccaaaacagaagtcagatactgtgctttttccagcaaaggatctcaaggaaaaggaccttcattcaatatttactcatgattctggtctgataacaataaacagttcacaagagcacctaactgttcaggcaaaggctccattccatactcctcctgaggaacccaatgaatgtgacttcaagaatatggatagtttaccttctggtaaaatacatcgaaaagtgaaaataatattaggacgaaatagaaaagaaaatctggaaccaaatgctgaatttgataaaagaactgaatttattacacaagaagaaaacagaatttgtagttcaccggtacagtctttactagacttgtttcagactagtgaagagaaatcagaatttttgggtttcacaagctacacagaaaagagtggtatatgcaatgttttagatatttgggaagaggaaaattcagataatctgttaacagcgtttttctcgtccccttcaacttctacatttactggcttttagaatttaaaaaatgcatacttttcagaagtgataaggatcatattcttgaaatttttataaatatgtatggaaattcttaggatttttttaccagctttgtttacagacccaaatgtaaatattaaaaataaatatttgcaattttctacagaattgaatacctgttaaagaaaaattacagaataaacttgtgactggtcttgttttacattaaaaaaaaaaaaaaaaaaaactcgag

SEQ ID NO: 119 - DNA, 2304 bp, Homo sapiens
  misc_feature: LIM domain only 2 (rhombotin-like 1)
gaattcgtccaaactgaggatcacaagtctccacattctgagtaggaggatgagggtctgagttaggatttgggtcctgcagggcttgctaaggaatcccctgatggcctaggattccacgcagagcacatctggtgtgagagagctcgctgcaagggtgaaggctccgccctatcagatagacaaccaggccaccaagaggcccagccctccaaaccctggatttgcaacatcctcaaagaacagcaacgggccttgagcagaattgagaaggaaatacccccacctgccctcagccgttaagtgggctttgctattcacaagggcctctgggtgtcctggcagagaggggagatggcacaggcaccaggtgctagggtgccagggcctcccgagaaggaacaggtgcaaagcaggcaattagcccagaaggtatccgtggggcaggcagcctagatctgatgggggaagccaccaggattacatcatctgctgtaacaactgctctgaaaagaagatatttttcaacctgaacttgcagtagctagtggagaggcaggaaaaaggaaatgaaacagagacagagggaagcctgagccaaaatagaccttcccgagagaggaggaagcccggagagagacgcacggtcccctccccgcccctaggccgccgccccctctctgccctcggcggcgagcagggcgccgcgacccggggccggaaaggtgccaggggctccgggcggccgggcgggcgcacaccatccccgcgggcggcgcggagccggcgacagcgcgcgagagggaccgggcggtggcggcggcgggaccgggatggaagggagcgcggtgactgtccttgagcgcggaggggcgagctcgccggcggaggccgagcaagcggaggcaggagcggcggcgacggcggcggcggcggcggcgcccgagcacccgagggggtccgagccccggcagccggccagccccgcgccacaaagggagcgcccccgccgcccggcaccccgcctccctccccaatgtcctcggccatcgaaaggaagagcctggacccttcagaggaaccagtggatgaggtgctgcagatccccccatccctgctgacatgcggcggctgccagcagaacatcggggaccgctacttcctgaaggccatcgaccagtactggcacgaggactgcctgagctgcgacctctgtggctgccggctgggtgaggtggggcggcgcctctactacaaactgggccggaagctctgccggagagactatctcaggctttttgggcaagacggtctctgcgcatcctgtgacaagcggattcgtgcctatgagatgacaatgcgggtgaaagacaaagtgtatcacctggaatgtttcaagtgcgccgcctgtcagaagcatttctgtgtaggtgacagatacctcctcatcaactctgacatagtgtgcgaacaggacatctacgagtggactaagatcaatgggatgatataggcccgagtccccgggcatctttggggaggtgttcactgaagacgccgtctccatggcatcttcgtcttcactcttaggcactttgggggtttgagggtggggtaagggatttcttaggggatggtagacctttattgggtatcaagacatagcatccaagtggcataattcaggggctgacacttcaaggtgacagaaggaccagcccttgagggagaacttatggccacagcccatccatagtaactgacatgattagcagaagaaaggaacatttaggggcaagcaggcgctgtgctatcatgatggaatttcatatctacagatagagagttgttgtgtacagacttgttgtgactttgacgcttgcgaactagagatgtgcaattgatttcttttcttcctggctttttaactcccctgtttcaatcactgtcctccacacaagggaaggacagaaaggagagtggccattctttttttcttggcccccttcccaaggccttaagctttggacccaagggaaaactgcatggagacgcatttcggttgagaatggaaaccacaacttttaaccaaacaattatttaaagcaatgctgatgaatcactgtttttagacaccttcattttgaggggaggagttccacagattgtttctatacaaatataaatcttaaaaagttgttcaactattttattatcctagattatatcaaagtatttgtcgtgtgtagaaaaaaaaaacagctctgcaggcttaataaaaatgacagactgaaaaaaaaaaaa

SEQ ID NO: 120 - DNA, 5185 bp, Homo sapiens
  misc_feature: mannose receptor, C type 1
gggaacttggattaggtggagaggcagttggggggcctcgttgttttgcgtcttagttccgccctcctgtccatcaggagaaggaaaggataaaccctgggccatgaggctacccctgctcctggtttttgcctctgtcattccgggtgctgttctcctactggacaccaggcaatttttaatctataatgaagatcacaagcgctgcgtggatgcagtgagtcccagtgccgtccaaaccgcagcttgcaaccaggatgccgaatcacagaaattccgatgggtgtccgaatctcagattatgagtgttgcatttaaattatgcctgggagtgccatcaaaaacagactgggttgctatcactctctatgcctgtgactcaaaaagtgaatttcagaaatgggagtgcaaaaatgacacacttttggggatcaaaggagaagatttattttttaactacggcaacagacaagaaaagaatattatgctctacaagggatcgggtttatggagcaggtggaagatctatggaaccacagacaatctgtgctccagaggttatgaagccatgtatacgctactaggcaatgccaatggagcaacctgtgcattcccgttcaagtttgaaaacaagtggtacgcagattgcacgagtgctgggcggtcggatggatggctctggtgcggaaccactactgactatgacacagacaagctatttggatattgtccattgaaatttgagggcagtgaaagcttatggaataaagacccgctgaccagcgtttcctaccagataaactccaaatccgctttaacgtggcaccaagcgaggaaaagctgccaacaacagaacgctgagctcctgagcatcacagagatacatgagcaaacatacctgacaggattaaccagttccttgacctcaggactctggattggacttaacagtctgagcttcaacagcggttggcagtggagtgaccgcagtcctttccgatatttgaactggttaccaggaagtccatcagctgaacctggaaaaagctgtgtgtcactaaatcctggaaaaaatgctaaatgggaaaatctggaatgtgttcagaaactgggctatatttgcaaaaagggcaacaccactttaaattcttttgttattccctcagaaagtgatgtgcctactcactgtcctagtcagtggtggccgtatgccggtcactgttacaagattcacagagatgagaaaaaaatccagagggatgctctgaccacctgcaggaaggaaggcggtgacctcacaagtatccacaccatcgaggaattggactttattatctcccagctaggatatgagccaaatgacgaattgtggatcggcttaaatgacattaagattcaaatgtactttgagtggagtgatgggacccctgtaacgtttaccaaatggcttcgtggagaaccaagccatgaaaacaacagacaggaggattgtgtggtgatgaaaggcaaggatgggtactgggcagatcggggctgtgagtggcctcttggctacatctgcaagatgaaatcacgaagccaaggtccagaaatagtggaagtcgaaaaaggctgcaggaaaggctggaaaaaacatcacttttactgctatatgattggacatacgctttcaacatttgcagaagcaaaccaaacctgtaataatgagaatgcttatttaacaactattgaagacagatatgaacaagccttcctgactagtttcgttggcttaaggcctgaaaaatatttctggacaggactttcagatatacaaaccaaagggacttttcagtggaccatcgaggaagaggttcggttcacccactggaattcagatatgccagggcgaaagccagggtgtgttgccatgagaaccgggattgcagggggcttatgggatgttttgaaatgtgatgaaaaggcaaaatttgtgtgcaagcactgggcagaaggagtaacccacccaccgaagcccacgacgactcccgaacccaaatgtccggaggattggggcgccagcagtagaacaagcttgtgtttcaagctgtatgcaaaaggaaaacatgagaagaaaacgtggtttgaatctcgagatttttgtcgagctctgggtggagacttagctagcatcaataacaaagaggaacagcaaacaatatggcgattaataacagctagtggaagctaccacaaactgttttggttgggattgacatatggaagcccttcagaaggttttacttggagtgatggttctcctgtttcatatgaaaactgggcttatggagaacctaataattatcaaaatgttgaatactgtggtgagctgaaaggtgaccctactatgtcttggaatgatattaattgtgaacaccttaacaactggatttgccagatacaaaaaggacaaacaccaaaacctgagccaacaccagctcctcaagacaatccaccagttactgaagatgggtgggttatttacaaagactaccagtattatttcagcaaagagaaggaaaccatggacaatgcgcgagcgttttgcaagaggaattttggtgatcttgtttctattcaaagtgaaagtgaaaagaagtttctatggaaatatgtaaacagaaatgatgcacagtctgcatattttattggtttattgatcagcttggataaaaagtttgcttggatggatggaagcaaagtggattacgtgtcttgggccacaggtgaacccaattttgcaaatgaagatgaaaactgtgtgaccatgtattcaaattcagggttttggaatgacattaactgtggctatccaaacgccttcatttgccagcgacataacagtagtatcaatgctaccacagttatgcctaccatgccctcggtcccatcagggtgcaaggaaggttggaatttctacagcaacaagtgtttcaaaatctttggatttatggaagaagaaagaaaaaattggcaagaggcacgaaaagcttgtataggctttggagggaatctggtctccatacaaaatgaaaaagagcaagcatttcttacctatcacatgaaggactccactttcagtgcctggactgggctgaatgatgtcaattcagaacacacgttcctttggacggatggacgaggagtccattacacaaactgggggaaaggttaccctggtggaagaagaagcagtctttcttatgaagatgctgactgtgttgttattattggaggtgcatcaaatgaagcaggaaaatggatggatgatacctgcgacagtaaacgaggctacatatgccagacacgatccgacccttccttgactaatcctccagcaacgattcaaacagatggctttgttaaatatggcaaaagcagctattcactcatgagacaaaaatttcaatggcatgaagcggagacatactgcaagcttcacaattcccttatagccagcattctggatccctacagtaatgcatttgcgtggctgcagatggaaacatctaatgaacgtgtgtggatcgccctgaacagtaacttgactgataatcaatacacttggactgataagtggagggtgaggtacactaactgggctgctgatgagcccaaattgaaatcagcatgtgtttatctggatcttgatggctactggaagacagcacattgcaatgaaagtttttactttctctgtaaaagatcagatgaaatccctgctactgaacccccacaactgcctggcagatgcccggagtcagatcacacagcatggattcctttccatggtcactgttactatattgagtcctcatatacaagaaactggggccaagcttctctggaatgtcttcgaatgggttcctctctggtttccattgaaagtgctgcagaatccagttttctgtcatatcgggttgagccacttaaaagtaaaaccaatttttggataggattgttcagaaatgttgaagggacgtggctgtggataaataacagtccggtctcctttgtcaactggaacacaggagatccctctggtgaacggaatgattgtgtagctttacatgcgtcttctgggttttggagtaatattcactgttcttcctacaaaggatatatttgtaaaagaccaaaaattattgatgctaaacctactcatgaattacttacaacaaaagctgacacaaggaagatggacccttctaaaccgtcttccaacgtggccggagtagtcatcattgtgatcctcctgattttaacgggtgctggccttgccgcctatttcttttataagaaaagacgtgtgcacctacctcaagagggcgcctttgaaaacactctgtattttaacagtcagtcaagcccaggaactagtgatatgaaagatctcgtgggcaatattgaacagaatgaacactcggtcatctagtacctcaatgcgattctgagatatttgaatttcataaaattgtaactgaaatttaaaatttttagttcaatgtgattgttttctttaaaatgagtactgaattgtactggtctgtccttttttcctttgcctaattgaagaaataattgcttgttttctagcctggcaagatattttcataaaagagggataacaatgctgattactaccttttaaaatattttagataaatgcacagcaccacagcaccacatctaagcattagtgatgggtagctgatgtcagcttcatgtggattttaagcactctagaaacaatgaagcttcttggcatattttaaggagctcccaaaatgtgttacctattaaattgtaactcagcaagtagaagaccatttgaaaagtcaggtacaaatttcctcaagtggcataaaaatgtagtcagttttctcttttaccagtttttatttccactccaattatttagaactttatttgtacatgtgcagaagaataaggcagctgagaatcttgtttcccccaagagagttttacaggctgagtgttgcaaatgtgttctttgtcctgttatatgtatatcaggaatacaaggatgtgaaataaaactgtaaatttgcataactggatgtacttagataatgtgaaataaacattaaagacaaggtctatttttaataaaaaaaaaaaaaaa

SEQ ID NO: 121 - DNA, 4908 bp, Homo sapiens
  misc_feature: kinesin family member 11
acctgcgtgcagtcggtcctccaggccacgcagcgcccgagagtaccagggagactccggcccctgtcggcgccaagcccctccgcccctcacagcgcccaggtccgcggccgggccttgattttttggcggggaccgtcatggcgtcgcagccaaattcgtctgcgaagaagaaagaggagaaggggaagaacatccaggtggtggtgagatgcagaccatttaatttggcagagcggaaagctagcgcccattcaatagtagaatgtgatcctgtacgaaaagaagttagtgtacgaactggaggattggctgacaagagctcaaggaaaacatacacttttgatatggtgtttggagcatctactaaacagattgatgtttaccgaagtgttgtttgtccaattctggatgaagttattatgggctataattgcactatctttgcgtatggccaaactggcactggaaaaacttttacaatggaaggtgaaaggtcacctaatgaagagtatacctgggaagaggatcccttggctggtataattccacgtacccttcatcaaatttttgagaaacttactgataatggtactgaattttcagtcaaagtgtctctgttggagatctataatgaagagctttttgatcttcttaatccatcatctgatgtttctgagagactacagatgtttgatgatccccgtaacaagagaggagtgataattaaaggtttagaagaaattacagtacacaacaaggatgaagtctatcaaattttagaaaagggggcagcaaaaaggacaactgcagctactctgatgaatgcatactctagtcgttcccactcagttttctctgttacaatacatatgaaagaaactacgattgatggagaagagcttgttaaaatcggaaagttgaacttggttgatcttgcaggaagtgaaaacattggccgttctggagctgttgataagagagctcgggaagctggaaatataaatcaatccctgttgactttgggaagggtcattactgcccttgtagaaagaacacctcatgttccttatcgagaatctaaactaactagaatcctccaggattctcttggagggcgtacaagaacatctataattgcaacaatttctcctgcatctctcaatcttgaggaaactctgagtacattggaatatgctcatagagcaaagaacatattgaataagcctgaagtgaatcagaaactcaccaaaaaagctcttattaaggagtatacggaggagatagaacgtttaaaacgagatcttgctgcagcccgtgagaaaaatggagtgtatatttctgaagaaaattttagagtcatgagtggaaaattaactgttcaagaagagcagattgtagaattgattgaaaaaattggtgctgttgaggaggagctgaatagggttacagagttgtttatggataataaaaatgaacttgaccagtgtaaatctgacctgcaaaataaaacacaagaacttgaaaccactcaaaaacatttgcaagaaactaaattacaacttgttaaagaagaatatatcacatcagctttggaaagtactgaggagaaacttcatgatgctgccagcaagctgcttaacacagttgaagaaactacaaaagatgtatctggtctccattccaaactggatcgtaagaaggcagttgaccaacacaatgcagaagctcaggatatttttggcaaaaacctgaatagtctgtttaataatatggaagaattaattaaggatggcagctcaaagcaaaaggccatgctagaagtacataagaccttatttggtaatctgctgtcttccagtgtctctgcattagataccattactacagtagcacttggatctctcacatctattccagaaaatgtgtctactcatgtttctcagatttttaatatgatactaaaagaacaatcattagcagcagaaagtaaaactgtactacaggaattgattaatgtactcaagactgatcttctaagttcactggaaatgattttatccccaactgtggtgtctatactgaaaatcaatagtcaactaaagcatattttcaagacttcattgacagtggccgataagatagaagatcaaaaaaaggaactagatggctttctcagtatactgtgtaacaatctacatgaactacaagaaaataccatttgttccttggttgagtcacaaaagcaatgtggaaacctaactgaagacctgaagacaataaagcagacccattcccaggaactttgcaagttaatgaatctttggacagagagattctgtgctttggaggaaaagtgtgaaaatatacagaaaccacttagtagtgtccaggaaaatatacagcagaaatctaaggatatagtcaacaaaatgacttttcacagtcaaaaattttgtgctgattctgatggcttctcacaggaactcagaaattttaaccaagaaggtacaaaattggttgaagaatctgtgaaacactctgataaactcaatggcaacctggaaaaaatatctcaagagactgaacagagatgtgaatctctgaacacaagaacagtttatttttctgaacagtgggtatcttccttaaatgaaagggaacaggaacttcacaacttattggaggttgtaagccaatgttgtgaggcttcaagttcagacatcactgagaaatcagatggacgtaaggcagctcatgagaaacagcataacatttttcttgatcagatgactattgatgaagataaattgatagcacaaaatctagaacttaatgaaaccataaaaattggtttgactaagcttaattgctttctggaacaggatctgaaactggatatcccaacaggtacgacaccacagaggaaaagttatttatacccatcaacactggtaagaactgaaccacgtgaacatctccttgatcagctgaaaaggaaacagcctgagctgttaatgatgctaaactgttcagaaaacaacaaagaagagacaattccggatgtggatgtagaagaggcagttctggggcagtatactgaagaacctctaagtcaagagccatctgtagatgctggtgtggattgttcatcaattggcggggttccatttttccagcataaaaaatcacatggaaaagacaaagaaaacagaggcattaacacactggagaggtctaaagtggaagaaactacagagcacttggttacaaagagcagattacctctgcgagcccagatcaacctttaattcacttgggggttggcaattttatttttaaagaaaacttaaaaataaaacctgaaaccccagaacttgagccttgtgtatagattttaaaagaatatatatatcagccgggcgcggtggctcatgcctgtaatcccagcactttgggaggctgaggcgggtggattgcttgagcccaggagtttgagaccagcctggccaacgtggcaaaacctcgtctctgttaaaaattagccgggcgtggtggcacactcctgtaatcccagctactggggaggctgaggcacgagaatcacttgaacccaggaagcggggttgcagtgagccaaaggtacaccactacactccagcctgggcaacagagcaagactcggtctcaaaaacaaaatttaaaaaagatataaggcagtactgtaaattcagttgaattttgatatctacccatttttctgtcatccctatagttcactttgtattaaattgggtttcatttgggatttgcaatgtaaatacgtatttctagttttcatataaagtagttcttttataacaaatgaaaagtatttttcttgtatattattaagtaatgaatatataagaactgtactcttctcagcttgagcttaacataggtaaatatcaccaacatctgtccttagaaaggaccatctcatgttttttttcttgctatgacttgtgtattttcttgcatcctccctagacttccctatttcgctttctcctcggctcactttctccctttttatttttcaccaaaccatttgtagagctacaaaacctatcctttcttattttcagtagtcagaattttatctagaaatcttttaacacctttttagtggttatttctaaaatcactgtcaacaataaatctaaccctagttgtatccctcctttaagtatttaaaacttgttgccccaaatgtgaaagcatttaattcctttaagaggcctaactcattcaccctgacagagttcacaaaaagcccactttagagtatacattgctattatgggagaccacccagacatctgactaatggctctgtgccacactccaagacctgtgccttttagagaagctcacaatgatttaaggactgtttgaaacttccaattatgtctataatttatattcttttgtttacatgatgaaactttttgttgttgcttgtttgtatataatacaatgtgtacatgtatctttttctcgattcaaatcttaacccttaggactctggtatttttgatctggcaaccatatttctggaagttgagatgtttcagcttgaagaaccaaaacagaaggaatatgtacaaagaataaattttctgctcacgatgagtttagtgtgtaaagtttagagacatctgactttgatagctaaattaaaccaaaccctattgaagaattgaatatatgctacttcaagaaactaaattgatctcgtagaattatcttaataaaataatggctataatttctctgcaaaatcagatgtcagcataagcgatggataatacctaataaactgccctcagtaaatccatggttaataaatgtggtttctacatt

SEQ ID NO: 122 - DNA, 2497 bp, Homo sapiens
  misc_feature: arachidonate 5-lipoxygenase
gggcgccgaggctccccgccgctcgctgctccccggcccgcgccatgccctcctacacggtcaccgtggccactggcagccagtggttcgccggcactgacgactacatctacctcagcctcgtgggctcggcgggctgcagcgagaagcacctgctggacaagcccttctacaacgacttcgagcgtggcgcggtggattcatacgacgtgactgtggacgaggaactgggcgagatccagctggtcagaatcgagaagcgcaagtactggctgaatgacgactggtacctgaagtacatcacgctgaagacgccccacggggactacatcgagttcccctgctaccgctggatcaccggcgatgtcgaggttgtcctgagggatggacgcgcaaagttggcccgagatgaccaaattcacattctcaagcaacaccgacgtaaagaactggaaacacggcaaaaacaatatcgatggatggagtggaaccctggcttccccttgagcatcgatgccaaatgccacaaggatttaccccgtgatatccagtttgatagtgaaaaaggagtggactttgttctgaattactccaaagcgatggagaacctgttcatcaaccgcttcatgcacatgttccagtcttcttggaatgacttcgccgactttgagaaaatctttgtcaagatcagcaacactatttctgagcgggtcatgaatcactggcaggaagacctgatgtttggctaccagttcctgaatggctgcaaccctgtgttgatccggcgctgcacagagctgcccgagaagctcccggtgaccacggagatggtagagtgcagcctggagcggcagctcagcttggagcaggaggtccagcaagggaacattttcatcgtggactttgagctgctggatggcatcgatgccaacaaaacagacccctgcacactccagttcctggccgctcccatctgcttgctgtataagaacctggccaacaagattgtccccattgccatccagctcaaccaaatcccgggagatgagaaccctattttcctcccttcggatgcaaaatacgactggcttttggccaaaatctgggtgcgttccagtgacttccacgtccaccagaccatcacccaccttctgcgaacacatctggtgtctgaggtttttggcattgcaatgtaccgccagctgcctgctgtgcaccccattttcaagctgctggtggcacacgtgagattcaccattgcaatcaacaccaaggcccgtgagcagctcatctgcgagtgtggcctctttgacaaggccaacgccacagggggcggtgggcacgtgcagatggtgcagagggccatgaaggacctgacctatgcctccctgtgctttcccgaggccatcaaggcccggggcatggagagcaaagaagacatcccctactacttctaccgggacgacgggctcctggtgtgggaagccatcaggacgttcacggccgaggtggtagacatctactacgagggcgaccaggtggtggaggaggacccggagctgcaggacttcgtgaacgatgtctacgtgtacggcatgcggggccgcaagtcctcaggcttccccaagtcggtcaagagccgggagcagctgtcggagtacctgaccgtggtgatcttcaccgcctccgcccagcacgccgcggtcaacttcggccagtacgactggtgctcctggatccccaatgcgcccccaaccatgcgagccccgccaccgactgccaagggcgtggtgaccattgagcagatcgtggacacgctgcccgaccgcggccgctcctgctggcatctgggtgcagtgtgggcgctgagccagttccaggaaaacgagctgttcctgggcatgtacccagaagagcattttatcgagaagcctgtgaaggaagccatggcccgattccgcaagaacctcgaggccattgtcagcgtgattgctgagcgcaacaagaagaagcagctgccatattactacttgtccccagaccggattccgaacagtgtggccatctgagcacactgccagtctcactgtgggaaggccagctgccccagccagatggactccagcctgcctggcaggctgtctggccaggcctcttggcagtcacatctcttcctccgaggccagtacctttccatttattctttgatcttcagggaactgcatagattgtatcaaagtgtaaacaccatagggacccattctacacagagcaggactgcacaggcgtcctgtccacacccagctcagcatttccacaccaagcagcaacagcaaatcacgaccactgatagatgtctattcttgttggagacatgggatgattattttctgttctatttgtgcttagtccaattccttgcacatagtaggtacccaattcaattactattgaatgaattaagaattggttgccataaaaataaatcagttcattt

SEQ ID NO: 123 - DNA, 1973 bp, Homo sapiens
  misc_feature: matrix metalloproteinase 1 (interstitial collagenase)
gggatattggagtagcaagaggctgggaagccatcacttaccttgcactgagaaagaagacaaaggccagtatgcacagctttcctccactgctgctgctgctgttctggggtgtggtgtctcacagcttcccagcgactctagaaacacaagagcaagatgtggacttagtccagaaatacctggaaaaatactacaacctgaagaatgatgggaggcaagttgaaaagcggagaaatagtggcccagtggttgaaaaattgaagcaaatgcaggaattctttgggctgaaagtgactgggaaaccagatgctgaaaccctgaaggtgatgaagcagcccagatgtggagtgcctgatgtggctcagtttgtcctcactgaggggaaccctcgctgggagcaaacacatctgacctacaggattgaaaattacacgccagatttgccaagagcagatgtggaccatgccattgagaaagccttccaactctggagtaatgtcacacctctgacattcaccaaggtctctgagggtcaagcagacatcatgatatcttttgtcaggggagatcatcgggacaactctccttttgatggacctggaggaaatcttgctcatgcttttcaaccaggcccaggtattggaggggatgctcattttgatgaagatgaaaggtggaccaacaatttcagagagtacaacttacatcgtgttgcggctcatgaactcggccattctcttggactctcccattctactgatatcggggctttgatgtaccctagctacaccttcagtggtgatgttcagctagctcaggatgacattgatggcatccaagccatatatggacgttcccaaaatcctgtccagcccatcggcccacaaaccccaaaagcgtgtgacagtaagctaacctttgatgctataactacgattcggggagaagtgatgttctttaaagacagattctacatgcgcacaaatcccttctacccggaagttgagctcaatttcatttctgttttctggccacaactgccaaatgggcttgaagctgcttacgaatttgccgacagagatgaagtccggtttttcaaagggaataagtactgggctgttcagggacagaatgtgctacacggataccccaaggacatctacagctcctttggcttccctagaactgtgaagcatatcgatgctgctctttctgaggaaaacactggaaaaacctacttctttgttgctaacaaatactggaggtatgatgaatataaacgatctatggatccaggttatcccaaaatgatagcacatgactttcctggaattggccacaaagttgatgcagttttcatgaaagatggatttttctatttctttcatggaacaagacaatacaaatttgatcctaaaacgaagagaattttgactctccagaaagctaatagctggttcaactgcaggaaaaattgaacattactaatttgaatggaaaacacatggtgtgagtccaaagaaggtgttttcctgaagaactgtctattttctcagtcatttttaacctctagagtcactgatacacagaatataatcttatttatacctcagtttgcatatttttttactatttagaatgtagccctttttgtactgatataatttagttccacaaatggtgggtacaaaaagtcaagtttgtggcttatggattcatataggccagagttgcaaagatcttttccagagtatgcaactctgacgttgatcccagagagcagcttcagtgacaaacatatcctttcaagacagaaagagacaggagacatgagtctttgccggaggaaaagcagctcaagaacacatgtgcagtcactggtgtcaccctggataggcaagggataactcttctaacacaaaataagtgttttatgtttggaataaagtcaaccttgtttctactgtttt

SEQ ID NO: 124 - DNA, 7365 bp, Homo sapiens
  misc_feature: breast cancer 1, early onset
ggcagtttgtaggtcgcgagggaagcgctgaggatcaggaagggggcactgagtgtccgtgggggaatcctcgtgataggaactggaatatgccttgagggggacactatgtctttaaaaacgtcggctggtcatgaggtcaggagttccagaccagcctgaccaacgtggtgaaactccgtctctactaaaaatacaaaaattagccgggcgtggtgccgctccagctactcaggaggctgaggcaggagaatcgctagaacccgggaggcggaggttgcagtgagccgagatcgcgccattgcactccagcctgggcgacagagcgagactgtctcaaaacaaaacaaaacaaaacaaaacaaaaaacaccggctgttcattggaacagaaagaaatggatttatctgctcttcgcgttgaagaagtacaaaatgtcattaatgctatgcagaaaatcttagagtgtcccatctgtctggagttgatcaaggaacctgtctccacaaagtgtgaccacatattttgcaaattttgcatgctgaaacttctcaaccagaagaaagggccttcacagtgtcctttatgtaagaatgatataaccaaaaggagcctacaagaaagtacgagatttagtcaacttgttgaagagctattgaaaatcatttgtgcttttcagcttgacacaggtttggagtatgcaaacagctataattttgcaaaaaaggaaaataactctcctgaacatctaaaagatgaagtttctatcatccaaagtatgggctacagaaaccgtgccaaaagacttctacagagtgaacccgaaaatccttccttgcaggaaaccagtctcagtgtccaactctctaaccttggaactgtgagaactctgaggacaaagcagcggatacaacctcaaaagacgtctgtctacattgaattgggatctgattcttctgaagataccgttaataaggcaacttattgcagtgtgggagatcaagaattgttacaaatcacccctcaaggaaccagggatgaaatcagtttggattctgcaaaaaaggctgcttgtgaattttctgagacggatgtaacaaatactgaacatcatcaacccagtaataatgatttgaacaccactgagaagcgtgcagctgagaggcatccagaaaagtatcagggtagttctgtttcaaacttgcatgtggagccatgtggcacaaatactcatgccagctcattacagcatgagaacagcagtttattactcactaaagacagaatgaatgtagaaaaggctgaattctgtaataaaagcaaacagcctggcttagcaaggagccaacataacagatgggctggaagtaaggaaacatgtaatgataggcggactcccagcacagaaaaaaaggtagatctgaatgctgatcccctgtgtgagagaaaagaatggaataagcagaaactgccatgctcagagaatcctagagatactgaagatgttccttggataacactaaatagcagcattcagaaagttaatgagtggttttccagaagtgatgaactgttaggttctgatgactcacatgatggggagtctgaatcaaatgccaaagtagctgatgtattggacgttctaaatgaggtagatgaatattctggttcttcagagaaaatagacttactggccagtgatcctcatgaggctttaatatgtaaaagtgaaagagttcactccaaatcagtagagagtaatattgaagacaaaatatttgggaaaacctatcggaagaaggcaagcctccccaacttaagccatgtaactgaaaatctaattataggagcatttgttactgagccacagataatacaagagcgtcccctcacaaataaattaaagcgtaaaaggagacctacatcaggccttcatcctgaggattttatcaagaaagcagatttggcagttcaaaagactcctgaaatgataaatcagggaactaaccaaacggagcagaatggtcaagtgatgaatattactaatagtggtcatgagaataaaacaaaaggtgattctattcagaatgagaaaaatcctaacccaatagaatcactcgaaaaagaatctgctttcaaaacgaaagctgaacctataagcagcagtataagcaatatggaactcgaattaaatatccacaattcaaaagcacctaaaaagaataggctgaggaggaagtcttctaccaggcatattcatgcgcttgaactagtagtcagtagaaatctaagcccacctaattgtactgaattgcaaattgatagttgttctagcagtgaagagataaagaaaaaaaagtacaaccaaatgccagtcaggcacagcagaaacctacaactcatggaaggtaaagaacctgcaactggagccaagaagagtaacaagccaaatgaacagacaagtaaaagacatgacagcgatactttcccagagctgaagttaacaaatgcacctggttcttttactaagtgttcaaataccagtgaacttaaagaatttgtcaatcctagccttccaagagaagaaaaagaagagaaactagaaacagttaaagtgtctaataatgctgaagaccccaaagatctcatgttaagtggagaaagggttttgcaaactgaaagatctgtagagagtagcagtatttcattggtacctggtactgattatggcactcaggaaagtatctcgttactggaagttagcactctagggaaggcaaaaacagaaccaaataaatgtgtgagtcagtgtgcagcatttgaaaaccccaagggactaattcatggttgttccaaagataatagaaatgacacagaaggctttaagtatccattgggacatgaagttaaccacagtcgggaaacaagcatagaaatggaagaaagtgaacttgatgctcagtatttgcagaatacattcaaggtttcaaagcgccagtcatttgctccgttttcaaatccaggaaatgcagaagaggaatgtgcaacattctctgcccactctgggtccttaaagaaacaaagtccaaaagtcacttttgaatgtgaacaaaaggaagaaaatcaaggaaagaatgagtctaatatcaagcctgtacagacagttaatatcactgcaggctttcctgtggttggtcagaaagataagccagttgataatgccaaatgtagtatcaaaggaggctctaggttttgtctatcatctcagttcagaggcaacgaaactggactcattactccaaataaacatggacttttacaaaacccatatcgtataccaccactttttcccatcaagtcatttgttaaaactaaatgtaagaaaaatctgctagaggaaaactttgaggaacattcaatgtcacctgaaagagaaatgggaaatgagaacattccaagtacagtgagcacaattagccgtaataacattagagaaaatgtttttaaagaagccagctcaagcaatattaatgaagtaggttccagtactaatgaagtgggctccagtattaatgaaataggttccagtgatgaaaacattcaagcagaactaggtagaaacagagggccaaaattgaatgctatgcttagattaggggttttgcaacctgaggtctataaacaaagtcttcctggaagtaattgtaagcatcctgaaataaaaaagcaagaatatgaagaagtagttcagactgttaatacagatttctctccatatctgatttcagataacttagaacagcctatgggaagtagtcatgcatctcaggtttgttctgagacacctgatgacctgttagatgatggtgaaataaaggaagatactagttttgctgaaaatgacattaaggaaagttctgctgtttttagcaaaagcgtccagaaaggagagcttagcaggagtcctagccctttcacccatacacatttggctcagggttaccgaagaggggccaagaaattagagtcctcagaagagaacttatctagtgaggatgaagagcttccctgcttccaacacttgttatttggtaaagtaaacaatataccttctcagtctactaggcatagcaccgttgctaccgagtgtctgtctaagaacacagaggagaatttattatcattgaagaatagcttaaatgactgcagtaaccaggtaatattggcaaaggcatctcaggaacatcaccttagtgaggaaacaaaatgttctgctagcttgttttcttcacagtgcagtgaattggaagacttgactgcaaatacaaacacccaggatcctttcttgattggttcttccaaacaaatgaggcatcagtctgaaagccagggagttggtctgagtgacaaggaattggtttcagatgatgaagaaagaggaacgggcttggaagaaaataatcaagaagagcaaagcatggattcaaacttaggtgaagcagcatctgggtgtgagagtgaaacaagcgtctctgaagactgctcagggctatcctctcagagtgacattttaaccactcagcagagggataccatgcaacataacctgataaagctccagcaggaaatggctgaactagaagctgtgttagaacagcatgggagccagccttctaacagctacccttccatcataagtgactcttctgcccttgaggacctgcgaaatccagaacaaagcacatcagaaaaagcagtattaacttcacagaaaagtagtgaataccctataagccagaatccagaaggcctttctgctgacaagtttgaggtgtctgcagatagttctaccagtaaaaataaagaaccaggagtggaaaggtcatccccttctaaatgcccatcattagatgataggtggtacatgcacagttgctctgggagtcttcagaatagaaactacccatctcaagaggagctcattaaggttgttgatgtggaggagcaacagctggaagagtctgggccacacgatttgacggaaacatcttacttgccaaggcaagatctagagggaaccccttacctggaatctggaatcagcctcttctctgatgaccctgaatctgatccttctgaagacagagccccagagtcagctcgtgttggcaacataccatcttcaacctctgcattgaaagttccccaattgaaagttgcagaatctgcccagagtccagctgctgctcatactactgatactgctgggtataatgcaatggaagaaagtgtgagcagggagaagccagaattgacagcttcaacagaaagggtcaacaaaagaatgtccatggtggtgtctggcctgaccccagaagaatttatgctcgtgtacaagtttgccagaaaacaccacatcactttaactaatctaattactgaagagactactcatgttgttatgaaaacagatgctgagtttgtgtgtgaacggacactgaaatattttctaggaattgcgggaggaaaatgggtagttagctatttctgggtgacccagtctattaaagaaagaaaaatgctgaatgagcatgattttgaagtcagaggagatgtggtcaatggaagaaaccaccaaggtccaaagcgagcaagagaatcccaggacagaaagatcttcagggggctagaaatctgttgctatgggcccttcaccaacatgcccacagatcaactggaatggatggtacagctgtgtggtgcttctgtggtgaaggagctttcatcattcacccttggcacaggtgtccacccaattgtggttgtgcagccagatgcctggacagaggacaatggcttccatgcaattgggcagatgtgtgaggcacctgtggtgacccgagagtgggtgttggacagtgtagcactctaccagtgccaggagctggacacctacctgataccccagatcccccacagccactactgactgcagccagccacaggtacagagccacaggaccccaagaatgagcttacaaagtggcctttccaggccctgggagctcctctcactcttcagtccttctactgtcctggctactaaatattttatgtacatcagcctgaaaaggacttctggctatgcaagggtcccttaaagattttctgcttgaagtctcccttggaaatctgccatgagcacaaaattatggtaatttttcacctgagaagattttaaaaccatttaaacgccaccaattgagcaagatgctgattcattatttatcagccctattctttctattcaggctgttgttggcttagggctggaagcacagagtggcttggcctcaagagaatagctggtttccctaagtttacttctctaaaaccctgtgttcacaaaggcagagagtcagacccttcaatggaaggagagtgcttgggatcgattatgtgacttaaagtcagaatagtccttgggcagttctcaaatgttggagtggaacattggggaggaaattctgaggcaggtattagaaatgaaaaggaaacttgaaacctgggcatggtggctcacgcctgtaatcccagcactttgggaggccaaggtgggcagatcactggaggtcaggagttcgaaaccagcctggccaacatggtgaaaccccatctctactaaaaatacagaaattagccggtcatggtggtggacacctgtaatcccagctactcaggtggctaaggcaggagaatcacttcagcccgggaggtggaggttgcagtgagccaagatcataccacggcactccagcctgggtgacagtgagactgtggctcaaaaaaaaaaaaaaaaaaggaaaatgaaactaggaaaggtttcttaaagtctgagatatatttgctagatttctaaagaatgtgttctaaaacagcagaagattttcaagaaccggtttccaaagacagtcttctaattcctcattagtaataagtaaaatgtttattgttgtagctctggtatataatccattcctcttaaaatataagacctctggcatgaatatttcatatctataaaatgacagatcccaccaggaaggaagctgttgctttctttgaggtgatttttttcctttgctccctgttgctgaaaccatacagcttcataaataattttgcttgctgaaggaagaaaaagtgtttttcataaacccattatccaggactgtttatagctgttggaaggactaggtcttccctagcccccccagtgtgcaagggcagtgaagacttgattgtacaaaatacgttttgtaaatgttgtgctgttaacactgcaaataaacttggtagcaaaca

SEQ ID NO: 125 - DNA, 2607 bp, Homo sapiens
  misc_feature: RAD54-like (S. cerevisiae)
gaattcgggcagattagaccctggtcctacactcttagccgctgcctgcttttgacctttggctcatgggtacttgacgttttaaactcctaggcccaggatgaggaggagcttggctcccagccagctggccaagagaaaacctgaaggcaggtcctgtgatgatgaagactggcaacctggcctagtgactcctaggaaacggaaatccagcagtgagacccagatccaggagtgtttcctgtctccttttcggaaacctttgagtcagctaaccaatcaaccaccttgtctggacagcagtcagcatgaagcatttattcgaagcattttgtcaaagcctttcaaagtccccattccaaattatcaaggtcctctgggctctcgagcattgggcctgaaaagggctggggtccgccgggccctccatgaccccctggaaaaagatgccttggttctgtatgagcctcccccgctgagcgctcatgaccagctgaagcttgacaaggagaaactccctgtccatgtggttgttgaccctattctcagtaaggttttgcggcctcatcagagagagggagtgaaattcctgtgggagtgtgtcaccagtcggcgcatccctggcagccatggctgcatcatggctgatgagatgggcctaggaaagacgctgcagtgcatcacattgatgtggacacttttacgccagagtccagagtgcaagccagaaattgacaaggcagtggtggtgtcgccttccagcctggtgaagaactggtacaatgaggttgggaaatggctcggagggaggatccaacctctggccatcgatggaggatctaaggatgaaatagaccaaaagctggaaggattcatgaaccagcgtggagccagggtgtcttctcccatcctcatcatttcctatgagaccttccgccttcatgttggagtcctccagaaaggaagtgttggtctggtcatatgtgacgagggacacaggctcaagaactctgagaatcagacttaccaagccctggacagcttgaacaccagccggcgggtgctcatctccggaactcccatccagaatgatctgcttgagtatttcagcttggtacattttgttaattccggcatcctagggactgcccatgaattcaagaagcattttgaattgccaattttgaagggtcgagacgctgctgctagtgaggcagacaggcagctaggagaggagcggctgcgggagctcaccagcattgtgaatagatgcctgatacggaggacttctgatatcctttctaaatatctgcctgtgaagattgagcaggtcgtttgttgtaggctgacaccccttcagactgagttatacaagaggtttctgagacaagccaaaccggcagaagaattgcttgagggcaagatgagtgtgtcttccctttcttccatcacctcgctaaagaagctttgtaatcatccagctctaatctatgataagtgtgtggaagaggaggatggctttgtgggtgccttggacctcttccctcctggttacagctctaaggccctggagccccagctgtcaggtaagatgctggtcctggattatattctggcggtgacccgaagccgtagcagtgacaaagtagtgctggtgtcgaattacacccagactttggatctctttgagaagctgtgccgtgcccgaaggtacttatacgtccgcctggatggcacgatgtccattaagaagcgagccaaggttgtagaacgcttcaatagtccatcgagccctgactttgtcttcatgctgagcagcaaagctgggggctgtggcctcaatctcattggggctaaccggctggtcatgtttgaccctgactggaacccagccaatgatgaacaagccatggcccgggtctggcgagatggtcaaaagaagacttgctatatctaccgcctgctgtctgcagggaccattgaggagaagatcttccagcgtcagagccacaagaaggcactgagcagctgtgtggtggatgaggagcaggatgtagagcgccacttctctctgggcgagttgaaggagctgtttatcctggatgaagctagcctcagtgacacacatgacaggttgcactgccgacgttgtgtcaacagccgtcagatccggccaccccctgatggttctgactgcacttcagacctggcagggtggaaccactgcactgataagtgggggctccgggatgaggtactccaggctgcctgggatgctgcctccactgctatcaccttcgtcttccaccagcattctcatgaggaacagcggggcctccgctgataaccagctggtctgggtgtagctcttagaggaaggagatagggaaaaggggctccttgctccacagggccctgttgaattttgttctctgggagaaaatcatcaagaagggctgcatgatgtttgcccaaaatttattttataagaaaaacttttttggttaaaaaaaagaataaaggtatgaaagggctggtgacagtcagggatgcccccggcacacagggactaggtctagtgagaacatcaggagcagccagggatcc

SEQ ID NO: 126 - DNA, 2231 bp, Homo sapiens
  misc_feature: matrix metalloproteinase 19
ggcacgagccccaaggctcccagaaatctcaggtcagaggcacggacagcctctggagctctcgtctggtgggaccatgaactgccagcagctgtggctgggcttcctactccccatgacagtctcaggccgggtcctggggcttgcagaggtggcgcccgtggactacctgtcacaatatgggtacctacagaagcctctagaaggatctaataacttcaagccagaagatatcaccgaggctctgagagcttttcaggaagcatctgaacttccagtctcaggtcagctggatgatgccacaagggcccgcatgaggcagcctcgttgtggcctagaggatcccttcaaccagaagacccttaaatacctgttgctgggccgctggagaaagaagcacctgactttccgcatcttgaacctgccctccacccttccaccccacacagcccgggcagccctgcgtcaagccttccaggactggagcaatgtggctcccttgaccttccaagaggtgcaggctggtgcggctgacatccgcctctccttccatggccgccaaagctcgtactgttccaatacttttgatgggcctgggagagtcctggcccatgccgacatcccagagctgggcagtgtgcacttcgacgaagacgagttctggactgaggggacctaccgtggggtgaacctgcgcatcattgcagcccatgaagtgggccatgctctggggcttgggcactcccgatattcccaggccctcatggccccagtctacgagggctaccggccccactttaagctgcacccagatgatgtggcagggatccaggctctctatggcaagaagagtccagtgataagggatgaggaagaagaagagacagagctgcccactgtgcccccagtgcccacagaacccagtcccatgccagacccttgcagtagtgaactggatgccatgatgctggggccccgtgggaagacctatgctttcaagggggactatgtgtggactgtatcagattcaggaccgggccccttgttccgagtgtctgccctttgggaggggctccccggaaacctggatgctgctgtctactcgcctcgaacacaatggattcacttctttaagggagacaaggtgtggcgctacattaatttcaagatgtctcctggcttccccaagaagctgaatagggtagaacctaacctggatgcagctctctattggcctctcaaccaaaaggtgttcctctttaagggctccgggtactggcagtgggacgagctagcccgaactgacttcagcagctaccccaaaccaatcaagggtttgtttacgggagtgccaaaccagccctcggctgctatgagttggcaagatggccgagtctacttcttcaagggcaaagtctactggcgcctcaaccagcagcttcgagtagagaaaggctatcccagaaatatttcccacaactggatgcactgtcgtccccggactatagacactaccccatcaggtgggaataccactccctcaggtacgggcataaccttggataccactctctcagccacagaaaccacgtttgaatactgactgctcacccacagacacaatcttggacattaacccctgaggctccaccacccaccctttcatttcccccccagaagcctaaggcctaatagctgaatgaaatacctgtctgctcagtagaaccttgcaggtgctgtagcaggcgcaagaccgtagatctcaggcctctaacacttccgaactccagccaccactttcctgtgcattttcactcctgagaagtgctcccctaactcagatcccctaacttagatttggcccccaactccatttcctgtctgtcttagacagcccttccaactgtgtcatctcttctctggaggtcaatggtggagggagatgcctgggtcctgttcttcctacataaaatgcaagaaaacagcatggccagtaaactgagcaagggccttggaatccttgagaatcacatttatgtgcttatgattacgggcaagctaattaaccttgttgaatctcagattccccatttgcaacattaggttaagaccagtactgcaggattgttgcactaaatgaaatactgtatgtgaagtgcctggcacagtgtctggtacatttgtgtttaataaaagctaactccatgttcataaaaaaaaaaaaaaaaaaa

SEQ ID NO: 127 - DNA, 1778 bp, Homo sapiens
  misc_feature: matrix metalloproteinase 12 (macrophage elastase)
tagaagtttacaatgaagtttcttctaatactgctcctgcaggccactgcttctggagctcttcccctgaacagctctacaagcctggaaaaaaataatgtgctatttggtgagagatacttagaaaaattttatggccttgagataaacaaacttccagtgacaaaaatgaaatatagtggaaacttaatgaaggaaaaaatccaagaaatgcagcacttcttgggtctgaaagtgaccgggcaactggacacatctaccctggagatgatgcacgcacctcgatgtggagtccccgatctccatcatttcagggaaatgccaggggggcccgtatggaggaaacattatatcacctacagaatcaataattacacacctgacatgaaccgtgaggatgttgactacgcaatccggaaagctttccaagtatggagtaatgttacccccttgaaattcagcaagattaacacaggcatggctgacattttggtggtttttgcccgtggagctcatggagacttccatgcttttgatggcaaaggtggaatcctagcccatgcttttggacctggatctggcattggaggggatgcacatttcgatgaggacgaattctggactacacattcaggaggcacaaacttgttcctcactgctgttcacgagattggccattccttaggtcttggccattctagtgatccaaaggctgtaatgttccccacctacaaatatgtcgacatcaacacatttcgcctctctgctgatgacatacgtggcattcagtccctgtatggagacccaaaagagaaccaacgcttgccaaatcctgacaattcagaaccagctctctgtgaccccaatttgagttttgatgctgtcactaccgtgggaaataagatctttttcttcaaagacaggttcttctggctgaaggtttctgagagaccaaagaccagtgttaatttaatttcttccttatggccaaccttgccatctggcattgaagctgcttatgaaattgaagccagaaatcaagtttttctttttaaagatgacaaatactggttaattagcaatttaagaccagagccaaattatcccaagagcatacattcttttggttttcctaactttgtgaaaaaaattgatgcagctgtttttaacccacgtttttataggacctacttctttgtagataaccagtattggaggtatgatgaaaggagacagatgatggaccctggttatcccaaactgattaccaagaacttccaaggaatcgggcctaaaattgatgcagtcttctattctaaaaacaaatactactatttcttccaaggatctaaccaatttgaatatgacttcctactccaacgtatcaccaaaacactgaaaagcaatagctggtttggttgttagaaatggtgtaattaatggtttttgttagttcacttcagcttaataagtatttattgcatatttgctatgtcctcagtgtaccactacttagagatatgtatcataaaaataaaatctgtaaaccataggtaatgattatataaaatacataatatttttcaattttgaaaactctaattgtccattcttgcttgactctactattaagtttgaaaatagttaccttcaaagcaagataattctatttgaagcatgctctgtaagttgcttcctaacatccttggactgagaaattatacttacttctggcataactaaaattaagtatatatattttggctcaaataaaattg

SEQ ID NO: 128 - DNA, 2245 bp, Homo sapiens
  misc_feature: solute carrier family 7 (cationic amino acid transporter, y+ system), member 7
agctgttgcagcatgagcgatacgcttggttctcctaactagcaccttcccctctcccctgactcagctggtagcccctcctccccgcacctgcccaaaggtcactggacaggcatttgtctggccttcccttttactgctggctgggaaggaggagcatcagaccacagatcctggaaggcacttctctccctgactgccgctcacactgccgtgagaacctgcttatatccaggaccaaggaggcaatgccaggaagctggtgaagggtttcctctcctccaccatggttgacagcactgagtatgaagtggcctcccagcctgaggtggaaacctcccctttgggtgatggggccagcccagggccggagcaggtgaagctgaagaaggagatctcactgcttaacggcgtgtgcctgattgtggggaacatgatcggctcaggcatctttgtttcccccaagggtgtgctcatatacagtgcctcctttggtctctctctggtcatctgggctgtcgggggcctcttctccgtctttggggccctttgttatgcggaactgggcaccaccattaagaaatctggggccagctatgcctatatcctggaggcctttggaggattccttgctttcatcagactctggacctccctgctcatcattgagcccaccagccaggccatcattgccatcacctttgccaactacatggtacagcctctcttcccgagctgcttcgccccttatgctgccagccgcctgctggctgctgcctgcatctgtctcttaaccttcattaactgtgcctatgtcaaatggggaaccctggtacaagatattttcacctatgctaaagtattggcactgatcgcggtcatcgttgcaggcattgttagacttggccagggagcctctactcattttgagaattcctttgagggttcatcatttgcagtgggtgacattgccctggcactgtactcagctctgttctcctactcaggctgggacaccctcaactatgtcactgaagagatcaagaatcctgagaggaacctgcccctctccattggcatctccatgcccattgtcaccatcatctatatcttgaccaatgtggcctattatactgtgctagacatgagagacatcttggccagtgatgctgttgctgtgacttttgcagatcagatatttggaatatttaactggataattccactgtcagttgcattatcctgttttggtggcctcaatgcctccattgtggctgcttcaaggcttttctttgtgggctcaagagaaggccatctccctgatgccatctgcatgatccatgttgagcggttcacaccagtgccttctctgctcttcaatggtatcatggcattgatctacttgtgcgtggaagacatcttccagctcattaactactacagcttcagctactggttctttgtggggctttctattgtgggtcagctttatctgcgctggaaggagcctgatcgacctcgtcccctcaagctcagcgttttcttcccgattgtcttctgcctctgcaccatcttcctggtggctgttccactttacagtgatactatcaactccctcatcggcattgccattgccctctcaggcctgcccttttacttcctcatcatcagagtgccagaacataagcgaccgctttacctccgaaggatcgtggggtctgccacaaggtacctccaggtcctgtgtatgtcagttgctgcagaaatggatttggaagatggaggagagatgcccaagcaacgggatcccaagtctaactaaacaccatctggaatcctgatgtggaaagcaggggtttctggtctactggctagagctaaggaagttgaaaaggaaagctcacttctttggaggcacctgtccagaagcctggcctaggcagcttcaacctttgaacttactttttgaaatgaaaagtaatttatttgttttgctacatactgttccagacttttaaaggggacaatgaaggtgactgtggggaggagcatgtcaggtttgggcttggttgttttagaagcacctgggtgtgcctacctactcctcttttcttttaaaagggcccacaatgctccaatttcctgtctcctttagagagacatgaaactatcacaggtgctggatgacaataaaagtttatgttcctaaaaaaaaaaaaaaaaaaaaaaaaaaaaaaaaaaaaaa

SEQ ID NO: 129 - DNA, 2921 bp, Homo sapiens
  misc_feature: exonuclease 1
gcacgaggtgccacatgcgatctctgagatatgtacacagtcattcttactatcgcactcagccattcttactacgctaaagaagaaataattattcgaggatatttgcctggcccagaagaaacttatgtaaatttcatgaactattatatccgttttcctcggagtgagagaaaactctttttagatatcatctgagaggtagttaatttggcaccatggggatacagggattgctacaatttatcaaagaagcttcagaacccatccatgtgaggaagtataaagggcaggtagtagctgtggatacatattgctggcttcacaaaggagctattgcttgtgctgaaaaactagccaaaggtgaacctactgataggtatgtaggattttgtatgaaatttgtaaatatgttactatctcatgggatcaagcctattctcgtatttgatggatgtactttaccttctaaaaaggaagtagagagatctagaagagaaagacgacaagccaatcttcttaagggaaagcaacttcttcgtgaggggaaagtctcggaagctcgagagtgtttcacccggtctatcaatatcacacatgccatggcccacaaagtaattaaagctgcccggtctcagggggtagattgcctcgtggctccctatgaagctgatgcgcagttggcctatcttaacaaagcgggaattgtgcaagccataattacagaggactcggatctcctagcttttggctgtaaaaaggtaattttaaagatggaccagtttggaaatggacttgaaattgatcaagctcggctaggaatgtgcagacagcttggggatgtattcacggaagagaagtttcgttacatgtgtattctttcaggttgtgactacctgtcatcactgcgtgggattggattagcaaaggcatgcaaagtcctaagactagccaataatccagatatagtaaaggttatcaagaaaattggacattatctcaagatgaatatcacggtaccagaggattacatcaacgggtttattcgggccaacaataccttcctctatcagctagtttttgatcccatcaaaaggaaacttattcctctgaacgcctatgaagatgatgttgatcctgaaacactaagctacgctgggcaatatgttgatgattccatagctcttcaaatagcacttggaaataaagatataaatacttttgaacagatcgatgactacaatccagacactgctatgcctgcccattcaagaagtcgtagttgggatgacaaaacatgtcaaaagtcagctaatgttagcagcatttggcataggaattactctcccagaccagagtcgggtactgtttcagatgccccacaattgaaggaaaatccaagtactgtgggagtggaacgagtgattagtactaaagggttaaatctcccaaggaaatcatccattgtgaaaagaccaagaagtgcagagctgtcagaagatgacctgttgagtcagtattctctttcatttacgaagaagaccaagaaaaatagctctgaaggcaataaatcattgagcttttctgaagtgtttgtgcctgacctggtaaatggacctactaacaaaaagagtgtaagcactccacctaggacgagaaataaatttgcaacatttttacaaaggaaaaatgaagaaagtggtgcagttgtggttccagggaccagaagcaggtttttttgcagttcagattctactgactgtgtatcaaacaaagtgagcatccagcctctggatgaaactgctgtcacagataaagagaacaatctgcatgaatcagagtatggagaccaagaaggcaagagactggttgacacagatgtagcacgtaattcaagtgatgacattccgaataatcatattccaggtgatcatattccagacaaggcaacagtgtttacagatgaagagtcctactcttttaagagcagcaaatttacaaggaccatttcaccacccactttgggaacactaagaagttgttttagttggtctggaggtcttggagatttttcaagaacgccgagcccctctccaagcacagcattgcagcagttccgaagaaagagcgattcccccacctctttgcctgagaataatatgtctgatgtgtcgcagttaaagagcgaggagtccagtgacgatgagtctcatcccttacgagaaggggcatgttcttcacagtcccaggaaagtggagaattctcactgcagagttcaaatgcatcaaagctttctcagtgctctagtaaggactctgattcagaggaatctgattgcaatattaagttacttgacagtcaaagtgaccagacctccaagctatgtttatctcatttctcaaaaaaagacacacctctaaggaacaaggttcctgggctatataagtccagttctgcagactctctttctacaaccaagatcaaacctctaggacctgccagagccagtgggctgagcaagaagccggcaagcatccagaagagaaagcatcataatgccgagaacaagccggggttacagatcaaactcaatgagctctggaaaaactttggatttaaaaaattctgaaaagcttcctccttgtaagaaacccctgtccccagtcagagataacatccaactaactccagaagcggaagaggatatatttaacaaacctgaatgtggccgtgttcaaagagcaatattccagtaaatgcagactgctgcaaagcttttgcctgcaagagaatctgatcaatttgaagtccctgtttgggaatgaggcacttatcagcatgaagaattttttctcattctgtgccattttaaaaatagaatacattttgtatattaactttaaaaaaaaaaaaaaaaaaa

SEQ ID NO: 130 - DNA, 1900 bp, Homo sapiens
  misc_feature: serine (or cysteine) proteinase inhibitor, clade B (ovalbumin), member 2
acaactctcagaggagcattgcccgtcagacagcaactcagagaataaccagagaacaaccagattgaaacaatggaggatctttgtgtggcaaacacactctttgccctcaatttattcaagcatctggcaaaagcaagccccacccagaacctcttcctctccccatggagcatctcgtccaccatggccatggtctacatgggctccaggggcagcaccgaagaccagatggccaaggtgcttcagtttaatgaagtgggagccaatgcagttacccccatgactccagagaactttaccagctgtgggttcatgcagcagatccagaagggtagttatcctgatgcgattttgcaggcacaagctgcagataaaatccattcatccttccgctctctcagctctgcaatcaatgcatccacagggaattatttactggaaagtgtcaataagctgtttggtgagaagtctgcgagcttccgggaagaatatattcgactctgtcagaaatattactcctcagaaccccaggcagtagacttcctagaatgtgcagaagaagctagaaaaaagattaattcctgggtcaagactcaaaccaaaggcaaaatcccaaacttgttacctgaaggttctgtagatggggataccaggatggtcctggtgaatgctgtctacttcaaaggaaagtggaaaactccatttgagaagaaactaaatgggctttatcctttccgtgtaaactcggctcagcgcacacctgtacagatgatgtacttgcgtgaaaagctaaacattggatacatagaagacctaaaggctcagattctagaactcccatatgctggagatgttagcatgttcttgttgcttccagatgaaattgccgatgtgtccactggcttggagctgctggaaagtgaaataacctatgacaaactcaacaagtggaccagcaaagacaaaatggctgaagatgaagttgaggtatacataccccagttcaaattagaagagcattatgaactcagatccattctgagaagcatgggcatggaggacgccttcaacaagggacgggccaatttctcagggatgtcggagaggaatgacctgtttctttctgaagtgttccaccaagccatggtggatgtgaatgaggagggcactgaagcagccgctggcacaggaggtgttatgacagggagaactggacatggaggcccacagtttgtggcagatcatccttttctttttcttattatgcataagataaccaactgcattttatttttcggcagattttcctcaccctaaaactaagcgtgctgcttctgcaaaagatttttgtagatgagctgtgtgcctcagaattgctatttcaaattgccaaaaatttagagatgttttctacatatttctgctcttctgaacaacttctgctacccactaaataaaaacacagaaataattagacaattgtctattataacatgacaaccctattaatcatttggtcttctaaaatgggatcatgcccatttagattttccttactatcagtttatttttataacattaacttttactttgttatttattattttatataatggtgagtttttaaattattgctcactgcctatttaatgtagctaataaagttatagaagcagatgatctgttaatttcctatctaataaatgcctttaattgttctcataatgaagaataagtaggtaccctccatgcccttctgtaataaatatctggaaaaaacattaaacaataggcaaatatatgttatgtgcatttctagaaatacataacacatatatatgtctgtatcttatattcaattgcaagtatataataaataaacctgcttccaaacaac

SEQ ID NO: 131 - DNA, 8224 bp, Homo sapiens
  misc_feature: chondroitin sulfate proteoglycan 2 (versican)
gctgccccgagcctttctggggaagaactccaggcgtgcggacgcaacagccgagaacattaggtgttgtggacaggagctgggaccaagatcttcggccagccccgcatcctcccgcatcttccagcaccgtcccgcaccctccgcatccttccccgggccaccacgcttcctatgtgacccgcctgggcaacgccgaacccagtcgcgcagcgctgcagtgaattttccccccaaactgcaataagccgccttccaaggccaagatgttcataaatataaagagcatcttatggatgtgttcaaccttaatagtaacccatgcgctacataaagtcaaagtgggaaaaagcccaccggtgaggggctccctctctggaaaagtcagcctaccttgtcatttttcaacgatgcctactttgccacccagttacaacaccagtgaatttctccgcatcaaatggtctaagattgaagtggacaaaaatggaaaagatttgaaagagactactgtccttgtggcccaaaatggaaatatcaagattggtcaggactacaaagggagagtgtctgtgcccacacatcccgaggctgtgggcgatgcctccctcactgtggtcaagctgctggcaagtgatgcgggtctttaccgctgtgacgtcatgtacgggattgaagacacacaagacacggtgtcactgactgtggatggggttgtgtttcactacagggcggcaaccagcaggtacacactgaattttgaggctgctcagaaggcttgtttggacgttggggcagtcatagcaactccagagcagctctttgctgcctatgaagatggatttgagcagtgtgacgcaggctggctggctgatcagactgtcagatatcccatccgggctcccagagtaggctgttatggagataagatgggaaaggcaggagtcaggacttatggattccgttctccccaggaaacttacgatgtgtattgttatgtggatcatctggatggtgatgtgttccacctcactgtccccagtaaattcaccttcgaggaggctgcaaaagagtgtgaaaaccaggatgccaggctggcaacagtgggggaactccaggcggcatggaggaacggctttgaccagtgcgattacgggtggctgtcggatgccagcgtgcgccaccctgtgactgtggccagggcccagtgtggaggtggtctacttggggtgagaaccctgtatcgttttgagaaccagacaggcttccctccccctgatagcagatttgatgcctactgctttaaacgtcgaatgagtgatttgagtgtaattggtcatccaatagattcagaatctaaagaagatgaaccttgtagtgaagaaacagatccagtgcatgatctaatggctgaaattttacctgaattccctgacataattgaaatagacctataccacagtgaagaaaatgaagaagaagaagaagagtgtgcaaatgctactgatgtgacaaccaccccatctgtgcagtacataaatgggaagcatctcgttaccactgtgcccaaggacccagaagctgcagaagctaggcgtggccagtttgaaagtgttgcaccttctcagaatttctcggacagctctgaaagtgatactcatccatttgtaatagccaaaacggaattgtctactgctgtgcaacctaatgaatctacagaaacaactgagtctcttgaagttacatggaagcctgagacttaccctgaaacatcagaacatttttcaggtggtgagcctgatgttttccccacagtcccattccatgaggaatttgaaagtggaacagccaaaaaaggggcagaatcagtcacagagagagatactgaagttggtcatcaggcacatgaacatactgaacctgtatctctgtttcctgaagagtcttcaggagagattgccattgaccaagaatctcagaaaatagcctttgcaagggctacagaagtaacatttggtgaagaggtagaaaaaagtacttctgtcacatacactcccactatagttccaagttctgcatcagcatatgtttcagaggaagaagcagttaccctaataggaaatccttggccagatgacctgttgtctaccaaagaaagctgggtagaagcaactcctagacaagttgtagagctctcagggagttcttcgattccaattacagaaggctctggagaagcagaagaagatgaagatacaatgttcaccatggtaactgatttatcacagagaaatactactgatacactcattactttagacactagcaggataatcacagaaagcttttttgaggttcctgcaaccaccatttatccagtttctgaacaaccttctgcaaaagtggtgcctaccaagtttgtaagtgaaacagacacttctgagtggatttccagtaccactgttgaggaaaagaaaaggaaggaggaggagggaactacaggtacggcttctacatttgaggtatattcatctacacagagatcggatcaattaattttaccctttgaattagaaagtccaaatgtagctacatctagtgattcaggtaccaggaaaagttttatgtccttgacaacaccaacacagtctgaaagggaaatgacagattctactcctgtctttacagaaacaaatacattagaaaatttgggggcacagaccactgagcacagcagtatccatcaacctggggttcaggaagggctgaccactctcccacgtagtcctgcctctgtctttatggagcagggctctggagaagctgctgccgacccagaaaccaccactgtttcttcattttcattaaacgtagagtatgcaattcaagccgaaaaggaagtagctggcactttgtctccgcatgtggaaactacattctccactgagccaacaggactggttttgagtacagtaatggacagagtagttgctgaaaatataacccaaacatccagggaaatagtgatttcagagcgattaggagaaccaaattatggggcagaaataaggggcttttccacaggttttcctttggaggaagatttcagtggtgactttagagaatactcaacagtgtctcatcccatagcaaaagaagaaacggtaatgatggaaggctctggagatgcagcatttagggacacccagacttcaccatctacagtacctacttcagttcacatcagtcacatatctgactcagaaggacccagtagcaccatggtcagcacttcagccttcccctgggaagagtttacatcctcagctgagggctcaggtgagcaactggtcacagtcagcagctctgttgttccagtgcttcccagtgctgtgcaaaagttttctggtacagcttcctccattatcgacgaaggattgggagaagtgggtactgtcaatgaaattgatagaagatccaccattttaccaacagcagaagtggaaggtacgaaagctccagtagagaaggaggaagtaaaggtcagtggcacagtttcaacaaactttccccaaactatagagccagccaaattatggtctaggcaagaagtcaaccctgtaagacaagaaattgaaagtgaaacaacatcagaggaacaaattcaagaagaaaagtcatttgaatcccctcaaaactctcctgcaacagaacaaacaatctttgattcacagacatttactgaaactgaactcaaaaccacagattattctgtactaacaacaaagaaaacttacagtgatgataaagaaatgaaggaggaagacacttctttagttaacatgtctactccagatccagatgcaaatggcttggaatcttacacaactctccctgaagctactgaaaagtcacattttttcttagctactgcattagtaactgaatctataccagctgaacatgtagtcacagattcaccaatcaaaaaggaagaaagtacaaaacattttccgaaaggcatgagaccaacaattcaagagtcagatactgagctcttattctctggactgggatcaggagaagaagttttacctactctaccaacagagtcagtgaattttactgaagtggaacaaatcaataacacattatatccccacacttctcaagtggaaagtacctcaagtgacaaaattgaagactttaacagaatggaaaatgtggcaaaagaagttggaccactcgtatctcaaacagacatctttgaaggtagtgggtcagtaaccagcacaacattaatagaaattttaagtgacactggagcagaaggacccacggtggcacctctccctttctccacggacatcggacatcctcaaaatcagactgtcaggtgggcagaagaaatccagactagtagaccacaaaccataactgaacaagactctaacaagaattcttcaacagcagaaattaacgaaacaacaacctcatctactgattttctggctagagcttatggttttgaaatggccaaagaatttgttacatcagcaccaaaaccatctgacttgtattatgaaccttctggagaaggatctggagaagtggatattgttgattcatttcacacttctgcaactactcaggcaaccagacaagaaagcagcaccacatttgtttctgatgggtccctggaaaaacatcctgaggtgccaagcgctaaagctgttactgctgatggattcccaacagtttcagtgatgctgcctcttcattcagagcagaacaaaagctcccctgatccaactagcacactgtcaaatacagtgtcatatgagaggtccacagacggtagtttccaagaccgtttcagggaattcgaggattccaccttaaaacctaacagaaaaaaacccactgaaaatattatcatagacctggacaaagaggacaaggatttaatattgacaattacagagagtaccatccttgaaattctacctgagctgacatcggataaaaatactatcatagatattgatcatactaaacctgtgtatgaagacattcttggaatgcaaacagatatagatacagaggtaccatcagaaccacatgacagtaatgatgaaagtaatgatgacagcactcaagttcaagagatctatgaggcagctgtcaacctttctttaactgaggaaacatttgagggctctgctgatgttctggctagctacactcaggcaacacatgatgaatcaatgacttatgaagatagaagccaactagatcacatgggctttcacttcacaactgggatccctgctcctagcacagaaacagaattagacgttttacttcccacggcaacatccctgccaattcctcgtaagtctgccacagttattccagagattgaaggaataaaagctgaagcaaaagccctggatgacatgtttgaatcaagcactttgtctgatggtcaagctattgcagaccaaagtgaaataataccaacattgggccaatttgaaaggactcaggaggagtatgaagacaaaaaacatgctggtccttcttttcagccagaattctcttcaggagctgaggaggcattagtagaccatactccctatctaagtattgctactacccaccttatggatcagagtgtaacagaggtgcctgatgtgatggaaggatccaatcccccatattacactgatacaacattagcagtttcaacatttgcgaagttgtcttctcagacaccatcatctcccctcactatctactcaggcagtgaagcctctggacacacagagatcccccagcccagtgctctgccaggaatagacgtcggctcatctgtaatgtccccacaggattcttttaaggaaattcatgtaaatattgaagcaactttcaaaccatcaagtgaggaataccttcacataactgagcctccctctttatctcctgacacaaaattagaaccttcagaagatgatggtaaacctgagttattagaagaaatggaagcttctcccacagaacttattgctgtggaaggaactgagattctccaagatttccaaaacaaaaccgatggtcaagtttctggagaagcaatcaagatgtttcccaccattaaaacacctgaggctggaactgttattacaactgccgatgaaattgaattagaaggtgctacacagtggccacactctacttctgcttctgccacctatggggtcgaggcaggtgtggtgccttggctaagtccacagacttctgagaggcccacgctttcttcttctccagaaataaaccctgaaactcaagcagctttaatcagagggcaggattccacgatagcagcatcagaacagcaagtggcagcgagaattcttgattccaatgatcaggcaacagtaaaccctgtggaatttaatactgaggttgcaacaccaccattttcccttctggagacttctaatgaaacagatttcctgattggcattaatgaagagtcagtggaaggcacggcaatctatttaccaggacctgatcgctgcaaaatgaacccgtgccttaacggaggcacctgttatcctactgaaacttcctacgtatgcacctgtgtgccaggatacagcggagaccagtgtgaacttgattttgatgaatgtcactctaatccctgtcgtaatggagccacttgtgttgatggttttaacacattcaggtgcctctgccttccaagttatgttggtgcactttgtgagcaagataccgagacatgtgactatggctggcacaaattccaagggcagtgctacaaatactttgcccatcgacgcacatgggatgcagctgaacgggaatgccgtctgcagggtgcccatctcacaagcatcctgtctcacgaagaacaaatgtttgttaatcgtgtgggccatgattatcagtggataggcctcaatgacaagatgtttgagcatgacttccgttggactgatggcagcacactgcaatacgagaattggagacccaaccagccagacagcttcttttctgctggagaagactgtgttgtaatcatttggcatgagaatggccagtggaatgatgttccctgcaattaccatctcacctatacgtgcaagaaaggaacagttgcttgcggccagccccctgttgtagaaaatgccaagacctttggaaagatgaaacctcgttatgaaatcaactccctgattagataccactgcaaagatggtttcattcaacgtcaccttccaactatccggtgcttaggaaatggaagatgggctatacctaaaattacctgcatgaacccatctgcataccaaaggacttattctatgaaatactttaaaaattcctcatcagcaaaggacaattcaataaatacatccaaacatgatcatcgttggagccggaggtggcaggagtcgaggcgctgatccctaaaatggcgaacatgtgttttcatcatttcagccaaagtcctaacttcctgtgcctttcctatcacctcgagaagtaattatcagttggtttggatttttggaccaccgttcagtcattttgggttgccgtgctcccaaaacattttaaatgaaagtattggcattcaaaaagacagcagacaaaatgaaagaaaatgagagcagaaagtaagcatttccagcctatctaatttctttagttttctatttgcctccagtgcagtccatttcctaatgtataccagcctactgtactatttaaaatgctcaatttcagcaccgatggccatgtaaataagatgatttaatgttgattttaatcctgtatataaaataaaaagtcacaatgagtttgggcatatttaatgatgattatggagccttagaggtctttaatcattggttcggctgcttttatgtagtttaggctggaaatggtttcacttgctctttgactgtcagcaagactgaagatggcttttcctggacagctagaaaacacaaaatcttgtaggtcattgcacctatctcagccataggtgcagtttgcttctacatgatgctaaaggctgcgaatgggatcctgatggaactaaggactccaatgtcgaactcttctttgctgcattcctttttcttcacttacaagaaaggcctgaatggaggacttttctgtaaccagg

SEQ ID NO: 132 - DNA, 1413 bp, Homo sapiens
  misc_feature: acid phosphatase 5, tartrate resistant
agggaataaaggctcagggaccggcagttctactctagagcccaccagcctctcagagcctccggtgactggcctgtgtctccccctggatggacatgtggacggcgctgctcatcctgcaagccttgttgctaccctccctggctgatggtgccacccctgccctgcgctttgtagccgtgggtgactggggaggggtccccaatgccccattccacacggcccgggaaatggccaatgccaaggagatcgctcggactgtgcagatcctgggtgcagacttcatcctgtctctaggggacaatttttacttcactggtgtgcaagacatcaatgacaagaggttccaggagacctttgaggacgtattctctgaccgctcccttcgcaaagtgccctggtacgtgctagccggaaaccatgaccaccttggcaatgtctctgcccagattgcatactctaagatctccaagcgctggaacttccccagccctttctaccgcctgcacttcaagatcccacagaccaatgtgtctgtggccatttttatgctggacacagtgacactatgtggcaactcagatgacttcctcagccagcagcctgagaggccccgagacgtgaagctggcccgcacacagctgtcctggctcaagaaacagctggcggcggccagggaggactacgtgctggtggctggccactaccccgtgtggtccatagccgagcacgggcctacccactgcctggtcaagcagctacggccactgctggccacatacggggtcactgcctacctgtgcggccacgatcacaatctgcagtacctgcaagatgagaatggcgtgggctacgtgctgagtggggctgggaatttcatggacccctcaaagcggcaccagcgcaaggtccccaacggctatctgcgcttccactatgggactgaagactcactgggtggctttgcctatgtggagatcagctccaaagagatgactgtcacttacatcgaggcctcgggcaagtccctctttaagaccaggctgccgaggcgagccaggccctgaactcccatgactgcccagctctgaggcccgatctccactgttgggtgggtggcctgccgggaccctgctcacaggcaggcttttcctccaacctgtggcgctgcagcagggcaggaaggggaaacacagctgatgaactgtggtgccacatgacccttgtggcacagatgcccacgtatgtgaaacacacatggacatgtgtcccagccacagtgttatgctctgtggctggctcacctttgctgagttccggggtgcaatgggggagggagggagggaaagcttcctcctaaatcaagcatctttctgttactgatgttcaataaaagaatagttgccaaggctg

SEQ ID NO: 133 - DNA, 2119 bp, Homo sapiens
  misc_feature: NIMA (never in mitosis gene a)-related kinase 2
ggcacgagtaggggtggcgggtcagtgctgctcgggggcttctccatccaggtccctggagttcctggtccctggagctccgcacttggcgcgcaacctgcgtgaggcagcgcgactctggcgactggccggccatgccttcccgggctgaggactatgaagtgttgtacaccattggcacaggctcctacggccgctgccagaagatccggaggaagagtgatggcaagatattagtttggaaagaacttgactatggctccatgacagaagctgagaaacagatgcttgtttctgaagtgaatttgcttcgtgaactgaaacatccaaacatcgttcgttactatgatcggattattgaccggaccaatacaacactgtacattgtaatggaatattgtgaaggaggggatctggctagtgtaattacaaagggaaccaaggaaaggcaatacttagatgaagagtttgttcttcgagtgatgactcagttgactctggccctgaaggaatgccacagacgaagtgatggtggtcataccgtattgcatcgggatcttaaaccagccaatgttttcctggatggcaagcaaaacgtcaagcttggagactttgggctagctagaatattaaaccatgacacgagttttgcaaaaacatttgttggcacaccttattacatgtctcctgaacaaatgaatcgcatgtcctacaatgagaaatcagatatctggtcattgggctgcttgctgtatgagttatgtgcattaatgcctccatttacagcttttagccagaaagaactcgctgggaaaatcagagaaggcaaattcaggcgaattccataccgttactctgatgaattgaatgaaattattacgaggatgttaaacttaaaggattaccatcgaccttctgttgaagaaattcttgagaaccctttaatagcagatttggttgcagacgagcaaagaagaaatcttgagagaagagggcgacaattaggagagccagaaaaatcgcaggattccagccctgtattgagtgagctgaaactgaaggaaattcagttacaggagcgagagcgagctctcaaagcaagagaagaaagattggagcagaaagaacaggagctttgtgttcgtgagagactagcagaggacaaactggctagagcagaaaatctgttgaagaactacagcttgctaaaggaacggaagttcctgtctctggcaagtaatccagaacttcttaatcttccatcctcagtaattaagaagaaagttcatttcagtggggaaagtaaagagaacatcatgaggagtgagaattctgagagtcagctcacatctaagtccaagtgcaaggacctgaagaaaaggcttcacgctgcccagctgcgggctcaagccctgtcagatattgagaaaaattaccaactgaaaagcagacagatcctgggcatgcgctagccaggtagagagacacagagctgtgtacaggatgtaatattaccaacctttaaagactgatattcaaatgctgtagtgttgaatacttggccccatgagccatgcctttctgtatagtacacatgatatttcggaattggttttactgttcttcagcaactattgtacaaaatgttcacatttaatttttctttcttcttttaagaacatattataaaaagaatactttcttggttgggcttttaatcctgtgtgtgattactagtaggaacatgagatgtgacattctaaatcttgggagaaaaaataatattaggaaaaaaatatttatgcaggaagagtagcactcactgaatagttttaaatgactgagtggtatgcttacaattgtcatgtctagatttaaattttaagtctgagattttaaatgtttttgagcttagaaaacccagttagatgcaatttggtcattaataccatgacatcttgcttataaatattccattgctctgtagttcaaatctgttagctttgtgaaaattcatcactgtgatgtttgtattctttttttttttctgtttaacagaatatgagctgtctgtcatttacctacttctttcccactaaataaaagaattcttcagtta

SEQ ID NO: 134 - DNA, 4407 bp, Homo sapiens
  misc_feature: dihydropyrimidine dehydrogenase
tttcgactcgcgctccggctgctgtcacttggctctctggctggagcttgaggacgcaaggagggtttgtcactggcagactcgagactgtaggcactgccatggcccctgtgctcagtaaggactcggcggacatcgagagtatcctggctttaaatcctcgaacacaaactcatgcaactctgtgttccacttcggccaagaaattagacaagaaacattggaaaagaaatcctgataagaactgctttaattgtgagaagctggagaataattttgatgacatcaagcacacgactcttggtgagcgaggagctctccgagaagcaatgagatgcctgaaatgtgcagatgccccgtgtcagaagagctgtccaactaatcttgatattaaatcattcatcacaagtattgcaaacaagaactattatggagctgctaagatgatattttctgacaacccacttggtctgacttgtggaatggtatgtccaacctctgatctatgtgtaggtggatgcaatttatatgccactgaagagggacccattaatattggtggattgcagcaatttgctactgaggtattcaaagcaatgagtatcccacagatcagaaatccttcgctgcctcccccagaaaaaatgtctgaagcctattctgcaaagattgctctttttggtgctgggcctgcaagtataagttgtgcttcctttttggctcgattggggtactctgacatcactatatttgaaaaacaagaatatgttggtggtttaagtacttctgaaattcctcagttccggctgccgtatgatgtagtgaattttgagattgagctaatgaaggaccttggtgtaaagataatttgcggtaaaagcctttcagtgaatgaaatgactcttagcactttgaaagaaaaaggctacaaagctgctttcattggaataggtttgccagaacccaataaagatgccatcttccaaggcctgacgcaggaccaggggttttatacatccaaagactttttgccacttgtagccaaaggcagtaaagcaggaatgtgcgcctgtcactctccattgccatcgatacggggagtcgtgattgtacttggagctggagacactgccttcgactgtgcaacatctgctctacgttgtggagctcgccgagtgttcatcgtcttcagaaaaggctttgttaatataagagctgtccctgaggagatggagcttgctaaggaagaaaagtgtgaatttctgccattcctgtccccacggaaggttatagtaaaaggtgggagaattgttgctatgcagtttgttcggacagagcaagatgaaactggaaaatggaatgaagatgaagatcagatggtccatctgaaagccgatgtggtcatcagtgcctttggttcagttctgagtgatcctaaagtaaaagaagccttgagccctataaaatttaacagatggggtctcccagaagtagatccagaaactatgcaaactagtgaagcatgggtatttgcaggtggtgatgtcgttggtttggctaacactacagtggaatcggtgaatgatggaaagcaagcttcttggtacattcacaaatacgtacagtcacaatatggagcttccgtttctgccaagcctgaactacccctcttttacactcctattgatctggtggacattagtgtagaaatggccggattgaagtttataaatccttttggtcttgctagcgcaactccagccaccagcacatcaatgattcgaagagcttttgaagctggatggggttttgccctcaccaaaactttctctcttgataaggacattgtgacaaatgtttcccccagaatcatccggggaaccacctctggccccatgtatggccctggacaaagctcctttctgaatattgagctcatcagtgagaaaacggctgcatattggtgtcaaagtgtcactgaactaaaggctgacttcccagacaacattgtgattgctagcattatgtgcagttacaataaaaatgactggacggaacttgccaagaagtctgaggattctggagcagatgccctggagttaaatttatcatgtccacatggcatgggagaaagaggaatgggcctggcctgtgggcaggatccagagctggtgcggaacatctgccgctgggttaggcaagctgttcagattcctttttttgccaagctgaccccaaatgtcactgatattgtgagcatcgcaagagctgcaaaggaaggtggtgccaatggcgttacagccaccaacactgtctcaggtctgatgggattaaaatctgatggcacaccttggccagcagtggggattgcaaagcgaactacatatggaggagtgtctgggacagcaatcagacctattgctttgagagctgtgacctccattgctcgtgctctgcctggatttcccattttggctactggtggaattgactctgctgaaagtggtcttcagtttctccatagtggtgcttccgtcctccaggtatgcagtgccattcagaatcaggatttcactgtgatcgaagactactgcactggcctcaaagccctgctttatctgaaaagcattgaagaactacaagactgggatggacagagtccagctactgtgagtcaccagaaagggaaaccagttccacgtatagctgaactcatggacaagaaactgccaagttttggaccttatctggaacagcgcaagaaaatcatagcagaaaacaagattagactgaaagaacaaaatgtagctttttcaccacttaagagaagctgttttatccccaaaaggcctattcctaccatcaaggatgtaataggaaaagcactgcagtaccttggaacatttggtgaattgagcaacgtagagcaagttgtggctatgattgatgaagaaatgtgtatcaactgtggtaaatgctacatgacctgtaatgattctggctaccaggctatacagtttgatccagaaacccacctgcccaccataaccgacacttgtacaggctgtactctgtgtctcagtgtttgccctattgtcgactgcatcaaaatggtttccaggacaacaccttatgaaccaaagagaggcgtacccttatctgtgaatccggtgtgttaaggtgatttgtgaaacagttgctgtgaactttcatgtcacctacatatgctgatctcttaaaatcatgatccttgtgttcagctctttccaaattaaaacaaatatacattttctaaataaaaatatgtaatttcaaaatacatttgtaagtgtaaaaaatgtctcatgtcaatgaccattcaattagtggcataaaatagaataattcttttctgaggatagtagttaaataactgtgtggcagttaattggatgttcactgccagttgtcttatgtgaaaaattaactttttgtgtggcaattagtgtgacagtttccaaattgccctatgctgtgctccatatttgatttctaattgtaagtgaaattaagcattttgaaacaaagtactctttaacatacaagaaaatgtatccaaggaaacattttatcaataaaaattacctttaattttaatgctgtttctaagaaaatgtagttagctccataaagtacaaatgaagaaagtcaaaaattatttgctatggcaggataagaaagcctaaaattgagtttgtggactttattaagtaaaatccccttcgctgaaattgcttatttttggtgttggatagaggatagggagaatatttactaactaaataccattcactactcatgcgtgagatgggtgtacaaactcatcctcttttaatggcatttctctttaaactatgttcctaaccaaatgagatgataggatagatcctggttaccactcttttactgtgcacatatgggccccggaattctttaatagtcaccttcatgattatagcaactaatgtttgaacaaagctcaaagtatgcaatgcttcattattcaagaatgaaaaatataatgttgataatatatattaagtgtgccaaatcagtttgactactctctgttttagtgtttatgtttaaaagaaatatattttttgttattattagataatatttttgtatttctctattttcataatcagtaaatagtgtcatataaactcatttatctcctcttcatggcatcttcaatatgaatctataagtagtaaatcagaaagtaacaatctatggcttatttctatgacaaattcaagagctagaaaaataaaatgtttcattatgcacttttagaaatgcatatttgccacaaaacctgtattactgaataatatcaaataaaatatcataaagcatttt

SEQ ID NO: 135 - DNA, 2030 bp, Homo sapiens
  misc_feature: CDC42 effector protein (Rho GTPase binding) 1
ccgcgacggccgccgccgtgcagacgacgagtccgccctcgtcccgcgcccccggggctcgcggagccaggtctccacctctgggcaggagagttgccgaccacctcgggggtgctttctctgcgcttgaacatctatagctgcttctgaggggctgggagccgggcccctgggagagacgagccatgaaccccccacagcctctgcatttggggacctcaccttaggagagtgccatttacagcttccgccagggcaaaggagctgagcagccatcccaagcccagcccacctccctcccccggcccctggtaggcatggactagcagctgtgagcagccagagctgatgcccggcccccaggggggcagaggcgccgccaccatgagcctgggcaagctctcgcctgtgggctgggtgtccagttcacagggaaagaggcggctgactgcagacatgatcagccacccactcggggacttccgccacaccatgcatgtgggccgtggcggggatgtcttcggggacacgtccttcctcagcaaccacggtggcagctccgggagcacccatcgctcaccccgcagcttcctggccaagaagctgcagctggtgcggagggtgggggcgcccccccggaggatggcatctccccctgcaccctccccggctccaccggccatctcccccatcatcaagaacgccatctccctgccccagctcaaccaggccgcctacgacagcctcgtggttggcaagctcagcttcgacagcagccccaccagctccacggacggccactccagctacggcctggactctgggttctgcaccatctcccgcctgccccgctcggaaaagccgcatgaccgagaccgggatggttccttcccctctgagcccgggcttcgccgctctgactctctcttgtccttccgcctggacctcgaccttgggccctcactcctcagcgagctgctaggggtcatgagcctgccagaagcccctgcagctgagactccagcccccgctgcaaaccccccagcccctactgcaaaccccacgggtcctgctgcaaaccccccagccactactgcaaaccccccagcgcctgctgcaaacccctcagcacctgccgcaacccccacgggtcctgctgcaaatcccccagcccctgccgcaagctccacaccccatggacactgtcccaatggggtaacagctgggttgggcccagtggctgaggtgaagtccagcccagtgggagggggtccccgaggacctgctggccctgccctcggcaggcactggggagcaggctgggatggcggccaccactacccagagatggatgcgcggcaggagcgggtggaggtgctgccccaagcccgggcctcctgggagagcctggacgaagagtggagggcgccccaggcaggcagcaggaccccagtgcccagcacagtgcaagcaaacacctttgaatttgcggatgctgaggaggatgatgaggtcaaggtgtgaggggctggggcacggtcccagggccccacctaggtgcagagccggcccctcacctaacagctggttcctaccagaccggagaggggagaagtcatgttgcccctaaacccctccccacctctgcaggacagacatgggagggaggacagggaaggccaggcttgctctgggacttttatgctcccagaggccctgccaaactgaccacctcccccgactgccactctggacctaatagctgttccttaggccccactccatgccacccccaccagctggaggacccagcctcacagtgtgtcctttgtgccagaccaagcggcccgtggggggtggggggcagggagtgtaccacacagggccattgtctcacctcccaaagggaccgcctgcccccagctcatcccagagcgtccctgctgcaaccctgacagccggtactcccaggccggcttaccccaactaccccgccccagccaccctccttaccccagcaaaggtcaggt

SEQ ID NO: 136 - DNA, 3030 bp, Homo sapiens
  misc_feature: chromosome condensation 1-like
ctgcgaggagtcacattaactttgctctagaagacaactttacaaggatctaaaaggaacaggattaaagatgactgaatactgggttccagaaatttaaaacaatcagcttagcaaatcatatattcttctgtggagctgagaattgatgtccgctcttccccgtgatttggaactttccaatcccagagaaaagttgacaaagggactgcccaggactgagtccatatggaagaagaacttcctcttttctctggagacagtggcaagccagtacaggctactctgtcatctttgaagatgttagatgtgggaaagtggccaattttttccctttgttctgaagaagaactacagttaattcgtcaggcttgtgtctttggcagtgctggcaatgaagttttatacactacagtaaatgatgagatttttgtgcttggcacaaactgctgtggctgtttggggttaggtgacgtccagagcaccattgaacctcggagactggattctttaaatggcaaaaaaatagcctgcctcagctatgggagtggtccacatattgtccttgcaacaacagaaggagaagtctttacctggggtcataatgcttatagccagctgggcaatgggacaactaatcatggtttagtgccctgtcatatctctactaatctgtcaaacaaacaagtcattgaagttgcctgtgggtcttaccattctttggtgctaacatctgatggagaggtatttgcctggggttataataactctgggcaggtaggatctggatcaacagttaatcagccaatccctcgaagagtcactggctgcctacaaaataaagtagttgtgaccatagcatgtgggcagatgtgctgcatggcagtagtagacacgggggaggtctatgtctggggttacaacggaaacgggcagcttggactcggcaacagtggcaaccagccaaccccttgcagagtggcagctttgcaaggcatccgtgtccagagggtcgcctgtggctacgcacacacattagtattaacagatgaaggccaagtgtatgcttggggcgccaattcttatgggcagttgggcactggcaataaaagcaaccagtcctatcctactcctgtcactgtggaaaaggacaggattatcgagattgcagcctgtcactccacacacacgtctgcggccaagacgcagggtgggcacgtgtacatgtggggccagtgccggggtcagtccgtgatcctcccgcacctcacccacttctcctgcactgacgacgtgtttgcctgctttgccacgcccgccgtcacgtggcgcctcctctccgtggaacctgatgaccacctcacagtggctgagtcactgaagagggaatttgacaacccggacactgcagacctgaagtttctagttgatggaaagtacatttatgcacataaagtccttctcaagattcgatgtgagcattttcgttcgtcattggaagataacgaggatgatattgtagaaatgagtgaattttcatatcctgtttaccgggccttcctggaatacctatacacagacagcatcagcctttctcctgaggaggcagtaggactgctagacttggctacattttatagagaaaatcgtttgaaaaagctctgccaacaaactatcaagcaaggcatctgcgaggagaatgccatcgctctgctctcggctgcggtgaagtatgatgcacaggatttagaagaattctgcttcaggttttgcataaaccatctgactgtagtaacacaaacatcaggttttgcagaaatggaccatgatctcctgaagaactttatcagcaaagcaagcagagttggagcctttaaaaattgatcccatctgcaggaaagtttttgagcctttccatttcccctgcaaaagccagagatgaatcacttctctttaattaatagtatgtatgatgagctatgtttggctgagtacttgtaactgtcagaagaaggatggtggtgagtggtctttgtctgcctaaacccagagtttatgtagaaagcattgaatgttctgatcagatgtgactaaggtcaaggaaaaaaaattgaaatatcttatttaccatttcctctttttgagtcacttaaattggacacctttggtaccctggtctcagtatatgctattctggcccaaatgttccattattcagctggctgataccacatagatagcttgacaaggagtgctgtctgtccttaccacattttcagcactcagcacagtgccttgtgtataataggcactcaatttattataaatcttcagtatgtcctgagaacagctttagtcatggaatactgggagaaggaataactttcacaaaataaacttaaaacagcctgtaattattgaggttcacattcttctggtatatcattctgagaaattgtggctaatttagaacattgtttagaattgacaaaaggccctggcaattaaattgtcaaggcccaagggctaattttaattttctttttacttggagtcattcattaatttctcacatgggattatggagtatgaagtattatctttgaatgaaattcctgggctgatctgccttacataatcacataaggtcctttgcttttctttgtgttaagagggacttgcctctgtaaatgaaaatgacaatgtgcttttcttgtagttgactttcatgtcactcactataaaataggtctcttaacctggcaccagtataactataaagcactagctgagaaggaactgatacttacatttcatggacagcattaacaagaatgagataaatttgtactttttagatcaaaacaaattacctaattgcaaaagagaaactgaaatggaacatagtctcagattcttctaatgtgtatctcacaatgtcatgtaatgtaaaggaaacccttttggaattagaattcttgttctgatgctgaactatttggtaataaagtgcttatttgcagataacag

SEQ ID NO: 137 - DNA, 643 bp, Homo sapiens
  misc_feature: nudix (nucleoside diphosphate linked moiety X)-type motif 1
gagcggcggtgcagaacccagggaccatgggcgcctccaggctctataccctggtgctggtcctgcagcctcagcgagttctcctgggcatgaaaaagcgaggcttcggggccggccggtggaatggctttgggggcaaagtgcaagaaggagagaccatcgaggatggggctaggagggagctgcaggaggagagcggtctgacagtggacgccctgcacaaggtgggccagatcgtgtttgagttcgtgggcgagcctgagctcatggacgtgcatgtcttctgcacagacagcatccaggggacccccgtggagagcgacgaaatgcgcccatgctggttccagctggatcagatccccttcaaggacatgtggcccgacgacagctactggtttccactcctgcttcagaagaagaaattccacgggtacttcaagttccagggtcaggacaccatcctggactacacactccgcgaggtggacacggtctagcgggagcccagggcagcccctgggcaggagacgtggctgctgaacagctgcaaaccatcttcacctgggggcattgagtggcgcagagccgggtttcatctggaattaactggatggaagggaaaataaagctatctagcggtgaa

SEQ ID NO: 138 - DNA, 1787 bp, Homo sapiens
  misc_feature: V-set and immunoglobulin domain containing 4
ggtagcaggaggctggaagaaaggacagaagtagctctggctgtgatggggatcttactgggcctgctactcctggggcacctaacagtggacacttatggccgtcccatcctggaagtgccagagagtgtaacaggaccttggaaaggggatgtgaatcttccctgcacctatgaccccctgcaaggctacacccaagtcttggtgaagtggctggtacaacgtggctcagaccctgtcaccatctttctacgtgactcttctggagaccatatccagcaggcaaagtaccagggccgcctgcatgtgagccacaaggttccaggagatgtatccctccaattgagcaccctggagatggatgaccggagccactacacgtgtgaagtcacctggcagactcctgatggcaaccaagtcgtgagagataagattactgagctccgtgtccagaaactctctgtctccaagcccacagtgacaactggcagcggttatggcttcacggtgccccagggaatgaggattagccttcaatgccaggctcggggttctcctcccatcagttatatttggtataagcaacagactaataaccaggaacccatcaaagtagcaaccctaagtaccttactcttcaagcctgcggtgatagccgactcaggctcctatttctgcactgccaagggccaggttggctctgagcagcacagcgacattgtgaagtttgtggtcaaagactcctcaaagctactcaagaccaagactgaggcacctacaaccatgacataccccttgaaagcaacatctacagtgaagcagtcctgggactggaccactgacatggatggctaccttggagagaccagtgctgggccaggaaagagcctgcctgtctttgccatcatcctcatcatctccttgtgctgtatggtggtttttaccatggcctatatcatgctctgtcggaagacatcccaacaagagcatgtctacgaagcagccagggcacatgccagagaggccaacgactctggagaaaccatgagggtggccatcttcgcaagtggctgctccagtgatgagccaacttcccagaatctgggcaacaactactctgatgagccctgcataggacaggagtaccagatcatcgcccagatcaatggcaactacgcccgcctgctggacacagttcctctggattatgagtttctggccactgagggcaaaagtgtctgttaaaaatgccccattaggccaggatctgctgacataattgcctagtcagtccttgccttctgcatggccttcttccctgctacctctcttcctggatagcccaaagtgtccgcctaccaacactggagccgctgggagtcactggctttgccctggaatttgccagatgcatctcaagtaagccagctgctggatttggctctgggcccttctagtatctctgccgggggcttctggtactcctctctaaataccagagggaagatgcccatagcactaggacttggtcatcatgcctacagacactattcaactttggcatcttgccaccagaagacccgagggaggctcagctctgccagctcagaggaccagctatatccaggatcatttctctttcttcagggccagacagcttttaattgaaattgttatttcacaggccagggttcagttctgctcctccactataagtctaatgttctgactctctcctggtgctcaataaatatctaatcataacagcaaaaaaaaaaaaaaaaaaa

SEQ ID NO: 139 - DNA, 3225 bp, Homo sapiens
  misc_feature: v-myb myeloblastosis viral oncogene homolog (avian)
ggcggcagcgccctgccgacgccggggagggacgcaggcaggcggcgggcagcgggaggcggcaccccggtgctccccgcggctctcggcggagccccgccgcccgccgcgccatggcccgaagaccccggcacagcatatatagcagtgacgaggatgatgaggactttgagatgtgtgaccatgactatgatgggctgcttcccaagtctggaaagcgtcacttggggaaaacaaggtggacccgggaagaggatgaaaaactgaagaagctggtggaacagaatggaacagatgactggaaagttattgccaattatctcccgaatcgaacagatgtgcagtgccagcaccgatggcagaaagtactaaaccctgagctcatcaagggtccttggaccaaagaagaagatcagagagtgatagagcttgtacagaaatacggtccgaaacgttggtctgttattgccaagcacttaaaggggagaattggaaaacaatgtagggagaggtggcataaccacttgaatccagaagttaagaaaacctcctggacagaagaggaagacagaattatttaccaggcacacaagagactggggaacagatgggcagaaatcgcaaagctactgcctggacgaactgataatgctatcaagaaccactggaattctacaatgcgtcggaaggtcgaacaggaaggttatctgcaggagtcttcaaaagccagccagccagcagtggccacaagcttccagaagaacagtcatttgatgggttttgctcaggctccgcctacagctcaactccctgccactggccagcccactgttaacaacgactattcctattaccacatttctgaagcacaaaatgtctccagtcatgttccataccctgtagcgttacatgtaaatatagtcaatgtccctcagccagctgccgcagccattcagagacactataatgatgaagaccctgagaaggaaaagcgaataaaggaattagaattgctcctaatgtcaaccgagaatgagctaaaaggacagcaggtgctaccaacacagaaccacacatgcagctaccccgggtggcacagcaccaccattgccgaccacaccagacctcatggagacagtgcacctgtttcctgtttgggagaacaccactccactccatctctgccagcggatcctggctccctacctgaagaaagcgcctcgccagcaaggtgcatgatcgtccaccagggcaccattctggataatgttaagaacctcttagaatttgcagaaacactccaatttatagattctttcttaaacacttccagtaaccatgaaaactcagacttggaaatgccttctttaacttccacccccctcattggtcacaaattgactgttacaacaccatttcatagagaccagactgtgaaaactcaaaaggaaaatactgtttttagaaccccagctatcaaaaggtcaatcttagaaagctctccaagaactcctacaccattcaaacatgcacttgcagctcaagaaattaaatacggtcccctgaagatgctacctcagacaccctctcatctagtagaagatctgcaggatgtgatcaaacaggaatctgatgaatctggatttgttgctgagtttcaagaaaatggaccacccttactgaagaaaatcaaacaagaggtggaatctccaactgataaatcaggaaacttcttctgctcacaccactgggaaggggacagtctgaatacccaactgttcacgcagacctcgcctgtgcgagatgcaccgaatattcttacaagctccgttttaatggcaccagcatcagaagatgaagacaatgttctcaaagcatttacagtacctaaaaacaggtccctggcgagccccttgcagccttgtagcagtacctgggaacctgcatcctgtggaaagatggaggagcagatgacatcttccagtcaagctcgtaaatacgtgaatgcattctcagcccggacgctggtcatgtgagacatttccagaaaagcattatggttttcagaacagttcaagttgacttgggatatatcattcctcaacatgaaacttttcatgaatgggagaagaacctatttttgttgtggtacaacagttgagagcacgaccaagtgcatttagttgaatgaagtcttcttggatttcacccaactaaaaggatttttaaaaataaataacagtcttacctaaattattaggtaatgaattgtagccagttgttaatatcttaatgcagatttttttaaaaaaaaacataaaatgatttatctggtattttaaaggatccaacagatcagtattttttcctgtgatgggttttttgaaatttgacacattaaaaggtactccagtatttcacttttctcgatcactaaacatatgcatatatttttaaaaatcagtaaaagcattactctaagtgtagacttaataccatgtgacatttaatccagattgtaaatgctcatttatggttaatgacattgaaggtacatttattgtaccaaaccattttatgagttttctgttagcttgctttaaaaattattactgtaagaaatagttttataaaaaattatatttttattcagtaatttaattttgtaaatgccaaatgaaaaacgttttttgctgctatggtcttagcctgtagacatgctgctagtatcagaggggcagtagagcttggacagaaagaaaagaaacttggtgttaggtaattgactatgcactagtatttcagactttttaattttatatatatatacattttttttccttctgcaatacatttgaaaacttgtttgggagactctgcattttttattgtggtttttttgttattgttggtttatacaagcatgcgttgcacttcttttttgggagatgtgtgttgttcatgttctatgttttgttttgtgtgtagcctgactgttttataatttgggagttctcgatttgatccgcatcccctgtggtttctaagtgtatggtctcagaactgttgcatggatcctgtgtttgcaactggggagacagaaactgtggttgatagccagtcactgccttaagaacatttgatgcaagatggccagcactgaacttttgagatatgacggtgtacttactgccttgtagcaaaataaagatgtgcccttatttt

SEQ ID NO: 140 - DNA, 3866 bp, Homo sapiens
  misc_feature: TTK protein kinase
ggaattcctttttttttttttttgagatggagtttcactcttgttggccaggctggagtgcaatggcacaatctcagcttactgcaacctccgcctcccgggttcaagcgattctcctgcctcagcctctcaagtagctgggattacaggcatgtgccaccacccctggctaactaatttcttttctatttagtagagatggggtttcaccatgttggtcaggctggtcttgaactcctgacctcaggtgatccacttgccttggcctcccaaagtgctaggattacagccgtgaaactgtgcctggctgattctttttttgttgttggatttttgaaacagggtctcccttggtcgcccaggctggagtgcagtggtgcgatcttggctcactataacctccacctcctggtttcaagtgatcctcccactttagcctcctgagtagctgtgattacaggcgtgcaccaccacacccggctaatttttgtatttttattagagacagggtttcaccatgttggccaggctgttctcaaactcctggactcaagggatccgcctgcctccacttcccaaagtcccgagattacaggtgtgagtcaccatgcctgaccttataattcttaagtcattttttctggtccatttcttccttagggtcctcacaacaaatctgcattaggcggtacaataatccttaacttcatgattcacaaaaggaagatgaagtgattcatgatttagaaaggggaagtagtaagcccactgcacactcctggatgatgatcctaaatccagatacagtaaaaatggggtatgggaaggtagaatacaaaatttggtttaaattaattatctaaatatctaaaaacatttttggatacattgttgatgtgaatgtaagactgtacagacttcctagaaaacagtttgggttccatcttttcatttccccagtgcagttttctgtagaaatggaatccgaggatttaagtggcagagaattgacaattgattccataatgaacaaagtgagagacattaaaaataagtttaaaaatgaagaccttactgatgaactaagcttgaataaaatttctgctgatactacagataactcgggaactgttaaccaaattatgatgatggcaaacaacccagaggactggttgagtttgttgctcaaactagagaaaaacagtgttccgctaagtgatgctcttttaaataaattgattggtcgttacagtcaagcaattgaagcgcttcccccagataaatatggccaaaatgagagttttgctagaattcaagtgagatttgctgaattaaaagctattcaagagccagatgatgcacgtgactactttcaaatggccagagcaaactgcaagaaatttgcttttgttcatatatcttttgcacaatttgaactgtcacaaggtaatgtcaaaaaaagtaaacaacttcttcaaaaagctgtagaacgtggagcagtaccactagaaatgctggaaattgccctgcggaatttaaacctccaaaaaaagcagctgctttcagaggaggaaaagaagaatttatcagcatctacggtattaactgcccaagaatcattttccggttcacttgggcatttacagaataggaacaacagttgtgattccagaggacagactactaaagccaggtttttatatggagagaacatgccaccacaagatgcagaaataggttaccggaattcattgagacaaactaacaaaactaaacagtcatgcccatttggaagagtcccagttaaccttctaaatagcccagattgtgatgtgaagacagatgattcagttgtaccttgttttatgaaaagacaaacctctagatcagaatgccgagatttggttgtgcctggatctaaaccaagtggaaatgattcctgtgaattaagaaatttaaagtctgttcaaaatagtcatttcaaggaacctctggtgtcagatgaaaagagttctgaacttattattactgattcaataaccctgaagaataaaacggaatcaagtcttctagctaaattagaagaaactaaagagtatcaagaaccagaggttccagagagtaaccagaaacagtggcaagctaagagaaagtcagagtgtattaaccagaatcctgctgcatcttcaaatcactggcagattccggagttagcccgaaaagttaatacagagcagaaacataccacttttgagcaacctgtcttttcagtttcaaaacagtcaccaccaatatcaacatctaaatggtttgacccaaaatctatttgtaagacaccaagcagcaataccttggatgattacatgagctgttttagaactccagttgtaaagaatgactttccacctgcttgtcagttgtcaacaccttatggccaacctgcctgtttccagcagcaacagcatcaaatacttgccactccacttcaaaatttacaggttttagcatcttcttcagcaaatgaatgcatttcggttaaaggaagaatttattccatattaaagcagataggaagtggaggttcaagcaaggtatttcaggtgttaaatgaaaagaaacagatatatgctataaaatatgtgaacttagaagaagcagataaccaaactcttgatagttaccggaacgaaatagcttatttgaataaactacaacaacacagtgataagatcatccgactttatgattatgaaatcacggaccagtacatctacatggtaatggagtgtggaaatattgatcttaatagttggcttaaaaagaaaaaatccattgatccatgggaacgcaagagttactggaaaaatatgttagaggcagttcacacaatccatcaacatggcattgttcacagtgatcttaaaccagctaactttctgatagttgatggaatgctaaagctaattgattttgggattgcaaaccaaatgcaaccagatacaacaagtgttgttaaagattctcaggttggcacagttaattatatgccaccagaagcaatcaaagatatgtcttcctccagagagaatgggaaatctaagtcaaagataagccccaaaagtgatgtttggtccttaggatgtattttgtactatatgacttacgggaaaacaccatttcagcagataattaatcagatttctaaattacatgccataattgatcctaatcatgaaattgaatttcccgatattccagagaaagatcttcaagatgtgttaaagtgttgtttaaaaagggacccaaaacagaggatatccattcctgagctcctggctcatccatatgttcaaattcaaactcatccagttaaccaaatggccaagggaaccactgaagaaatgaaatatgttctgggccaacttgttggtctgaattctcctaactccattttgaaagctgctaaaactttatatgaacactatagtggtggtgaaagtcataattcttcatcctccaagacttttgaaaaaaaaaggggaaaaaaatgatttgcagttattcgtaatgtcagataggaggtataaaatatattggactgttatactcttgaatccctgtggaaatctacatttgaagacaacatcactctgaagtgttatcagcaaaaaaaattcagtgagattatctttaaaagaaaactgtaaaaatagcaaccacttatggcactgtatatattgtagacttgttttctctgttttatgctcttgtgtaatctacttgacatcattttactcttggaatagtgggtggatagcaagtatattctaaaaaactttgtaaataaagttttgtggctaaaatga

SEQ ID NO: 141 - DNA, 4238 bp, Homo sapiens
  misc_feature: cyclin F
gcgctctcaggcgggctccggcggcagcgacgcgagcgcggcgatggggagcggcggcgtggtccactgtaggtgtgccaagtgtttctgttatcctacaaagcgaagaataaggaggaggccccgaaacctgaccatcttgagtctccccgaagatgtgctctttcacatcctgaaatggctttctgtagaggacatcctggccgtccgagctgtacactcccagctgaaggacctggtggacaaccacgccagtgtgtgggcatgtgccagcttccaggagctgtggccgtctccagggaacctgaagctctttgaaagggctgctgaaaaggggaatttcgaagctgctgtgaagctgggcatagcctacctctacaatgaaggcctgtctgtgtctgatgaggcccgcgcagaagtgaatggcctgaaggcctctcgcttcttcagtctcgctgagcggctgaatgtgggtgccgcacctttcatctggctcttcatccgccctccgtggtcggtgagcggaagctgctgcaaggccgtggttcacgagagcctcagggcagagtgccagctgcagaggactcacaaagcatccatattgcactgcttgggcagagtgctgagtctgttcgaggatgaggagaagcagcagcaggcccatgacctgtttgaggaggctgctcatcagggatgtctgaccagctcctacctcctctgggaaagcgacaggaggacagatgtgtcagatcctgggcgatgcctccacagcttccgaaaactcagggactacgctcgcaaaggctgctgggaagcgcagctgtctttagccaaagcctgtgcaaatgcaaaccagcttggactggaggtgagagcttccagtgagatcgtctgccagctatttcaggcttcccaggctgtcagtaaacaacaagtcttctccgtgcagaagggactcaatgacacaatgaggtacattctgatcgactggctggtggaagttgccaccatgaatgacttcacaagcctgtgcctgcacctgaccgtggagtgtgtggaccggtacctgcggaggaggctggtgccgcggtacaggctccagctgctgggcatcgcctgcatggtcatctgcacccggtttatcagtaaagagatcctgaccatccgggaggccgtatggctcacggacaacacttacaagtacgaggacctggtgagaatgatgggcgagatcgtctccgccttggaagggaagattcgagtccccactgtggtggattacaaggaggtcctgctgacgctagtccctgtggagctgagaacccagcacctgtgcagcttcctctgcgagctctccctgctgcacaccagcctgtccgcctacgccccagcccgcctggctgccgcagccctgctcctggccagactgacgcacgggcagacacagccctggaccactcagctgtgggacctcaccggattctcctatgaagacctcattccctgcgtcttgagcctccataagaagtgcttccatgatgacgcccccaaggactacaggcaagtctctctgaccgccgtgaagcagcggtttgaggacaagcgctatggagaaatcagccaggaagaggtgctgagctacagccagttgtgtgctgcattaggagtgacacaagacagccccgaccccccgactttcctcagcacaggggagatccacgccttcctcagctctccctcggggcggagaaccaaacggaagcgggagaacagcctccaggaagacagaggcagcttcgttaccacccccactgcggagctgtccagccaggaggagaccgtgctgggcagcttcctcgactggagcctggactgctgctctggctatgaaggcgaccaggagagtgagggcgagaaggagggcgacgtgacagctcccagcggcatcctcgatgtcaccgtggtctacctgaacccagaacagcattgctgccaggaatccagtgatgaggaggcttgtccagaggcaaagggaccccaggacccacaggcactggcgctggacacccagatccctgcaacccctggacccaaacccctggtccgcaccagccgggagccagggaaggacgtcacgacctcagggtactcctccgtcagcaccgcaagtcccacaagctccgtggacggtggcttgggggccctgccccaacctacctcagtgctgtccctgcacagtgactcgcacacacagccctgccaccatcaggccaggaagtcatgtttacagtgtcgtcccccaagtcccccggagagcagtgttccccagcaacaggtgaagcggataaacctatgcatacacagtgaggaggaggacatgaacctgggccttgtgaggctgtaagtgtgtcagcacatttgccgcagtggatgtgtactgagggggctggaggcgaagggtgggagcatagcataggaacgctgcatagaccatggaggcctttgcgcagagagcagagaggatgacttgcggccaccaagtttctgtctccgcgggagtcccgtgcaagccatcagaatgttgaaatgagggtgaagagctcagatccctctctttggaaagtttagcctggaagcagttggccacactgtgtggagggcacctctctgtcccttccgtgtctcactgtctctggaagcttcagcccatgtgtgtcctggtgttcccagccccaccagagccccgtgccgggagctgacagctttcacgcttaaggcacgtgtgacctgggtagtcagacaccacttgagcccctgcccacatctgctggtttggggcttcagtggggagctgacagctgtgagcacaccactgtcccctcatccacctcggcctgcatggggcacccacttccttctgggtggggcttccatggtaagggggcctgcgtccctgcacactgcgaggactgccttgccacaggcccactccctacgacacgtgactcgttttagagctctgtcccagaggcgttcgtatgtgacccacagatggcgtcaatgtgaacacctctctttgtgctgaatttctgggccattcttttcctgtcttatttctaaatttccttcttccaagatgaaaacaaaagaaaaacttaaaacagaaggtattaaaaaaacaagagattcccaccattatttaggttcacctgcaaaacaaaaatcttactccagcccctcaatgccatcctgacacactttatgcaaaaagaattttcccagataggctagccagaaaaaacttcaagtcctctgtaacatctgaggtgaccaagaggcagaagagcagagcagtcgggggccgtgtcctggctgatcccaactgcagctctgctgtgggggcccgtgggagggaggcagacccctgggctttcctgctggccacggagactctgctcctgcatggaaagggagcctgggagccagcagcccacgcctggggagcctgcctggggccatgtgaccatggcctctccctgggaacgggctgaccacaacacaccctgctgccatccacttctgtttactctgcaaatgtaagaaagaaccacttggccagaagtgtcccccagatgcttttttttttttttttttggagacagttttgctcttgtctccccggctggagtgcagtggcatgatctcaactctcaactcactgtaacctccgcctcccggatactcctgcctcagcctcctgggtagctgggattacaagcacccaaccacgcccagctaatttttgtattttcggtagagacgggatttcaccatgttggccaggctagtctcgaactcatgacctcaagtgatccgcccacttcggtctcccaaagtgctgggattacaggcatgagccacggcgcctggcccccaaatgctcttgaaccggaaacccagggatgggagatgctcactgagctgctgcttttatgtgtgctggtgctatgtgtgttcatgtccgcggcagctgtctttttgctactataagggaattctggccaccctgggtggggtgtggtcggggtgagaacccaagcgttggaactgtagacccgtcctgtcgactgtgtgcccctgggcatgtgtgagcctcagtttcctcatctgtaaggggggcaatgatacctacctcacagggggttgtgaggattaaatgtgaggaggatagtggcaac

SEQ ID NO: 142 - DNA, 1496 bp, Homo sapiens
  misc_feature: fibrinogen-like 2
cgcactccctgctgggtgagcagcactgtaaagatgaagctggctaactggtactggctgagctcagctgttcttgccacttacggttttttggttgtggcaaacaatgaaacagaggaaattaaagatgaaagagcaaaggatgtctgcccagtgagactagaaagcagagggaaatgcgaagaggcaggggagtgcccctaccaggtaagcctgccccccttgactattcagctcccgaagcaattcagcaggatcgaggaggtgttcaaagaagtccaaaacctcaaggaaatcgtaaatagtctaaagaaatcttgccaagactgcaagctgcaggctgatgacaacggagacccaggcagaaacggactgttgttacccagtacaggagccccgggagaggttggtgataacagagttagagaattagagagtgaggttaacaagctgtcctctgagctaaagaatgccaaagaggagatcaatgtacttcatggtcgcctggagaagctgaatcttgtaaatatgaacaacatagaaaattatgttgacagcaaagtggcaaatctaacatttgttgtcaatagtttggatggcaaatgttcaaagtgtcccagccaagaacaaatacagtcacgtccagttcaacatctaatatataaagattgctctgactactacgcaataggcaaaagaagcagtgagacctacagagttacacctgatcccaaaaatagtagctttgaagtttactgtgacatggagaccatggggggaggctggacagtgctgcaggcacgtctcgatgggagcaccaacttcaccagaacatggcaagactacaaagcaggctttggaaacctcagaagggaattttggctggggaacgataaaattcatcttctgaccaagagtaaggaaatgattctgagaatagatcttgaagactttaatggtgtcgaactatatgccttgtatgatcagttttatgtggctaatgagtttctcaaatatcgtttacacgttggtaactataatggcacagctggagatgcattacgtttcaacaaacattacaaccacgatctgaagtttttcaccactccagataaagacaatgatcgatatccttctgggaactgtgggctgtactacagttcaggctggtggtttgatgcatgtctttctgcaaacttaaatggcaaatattatcaccaaaaatacagaggtgtccgtaatgggattttctggggtacctggcctggtgtaagtgaggcacaccctggtggctacaagtcctccttcaaagaggctaagatgatgatcagacccaagcactttaagccataaatcactctgttcattcctccaggtattcgttatctaatagggcaattaattccttcagcactttagaatatgccttgtttcatatttttcatagctaaaaaatgtttgacatcctttgagatattttattactaaaatctgcc

SEQ ID NO: 143 - DNA, 6386 bp, Homo sapiens
  misc_feature: baculoviral IAP repeat-containing 1
  misc_feature (2232)..(2232): n is a, c, g, or t
  misc_feature (3055)..(3055): n is a, c, g, or t
  misc_feature (3184)..(3184): n is a, c, g, or t
  misc_feature (3186)..(3187): n is a, c, g, or t
  misc_feature (5653)..(5653): n is a, c, g, or t
  misc_feature (6163)..(6163): n is a, c, g, or t
  misc_feature (6166)..(6166): n is a, c, g, or t
  misc_feature (6225)..(6225): n is a, c, g, or t
  misc_feature (6232)..(6232): n is a, c, g, or t
  misc_feature (6298)..(6298): n is a, c, g, or t
  misc_feature (6311)..(6311): n is a, c, g, or t
  misc_feature (6330)..(6330): n is a, c, g, or t
  misc_feature (6332)..(6332): n is a, c, g, or t
  misc_feature (6336)..(6336): n is a, c, g, or t
  misc_feature (6342)..(6342): n is a, c, g, or t
  misc_feature (6344)..(6345): n is a, c, g, or t
  misc_feature (6348)..(6348): n is a, c, g, or t
  misc_feature (6353)..(6353): n is a, c, g, or t
  misc_feature (6355)..(6355): n is a, c, g, or t
  misc_feature (6361)..(6361): n is a, c, g, or t
  misc_feature (6365)..(6366): n is a, c, g, or t
  misc_feature (6374)..(6374): n is a, c, g, or t
  misc_feature (6383)..(6384): n is a, c, g, or t
tgcatgaagacaaaaggtcctgtgctcacctgggacccttctggacgttgccctgtgtacctcttcgactgcctgttcatctacgacgaaccccgggtattgaccccagacaacaatgccacttcatattggggacttcgtctgggattccaaggtgcattcattgcaaagttccttaaatattttctcactgcttcctactaaaggacggacagagcatttgttcttcagccacatactttccttccactggccagcattctcctctattagactagaactgtggataaacctcagaaaatggccacccagcagaaagcctctgacgagaggatctcccagtttgatcacaatttgctgccagagctgtctgctcttctgggcctagatgcagttcagttggcaaaggaactagaagaagaggagcagaaggagcgagcaaaaatgcagaaaggctacaactctcaaatgcgcagtgaagcaaaaaggttaaagacttttgtgacttatgagccgtacagctcatggataccacaggagatggcggccgctgggttttacttcactggggtaaaatctgggattcagtgcttctgctgtagcctaatcctctttggtgccggcctcacgagactccccatagaagaccacaagaggtttcatccagattgtgggttccttttgaacaaggatgttggtaacattgccaagtacgacataagggtgaagaatctgaagagcaggctgagaggaggtaaaatgaggtaccaagaagaggaggctagacttgcgtccttcaggaactggccattttatgtccaagggatatccccttgtgtgctctcagaggctggctttgtctttacaggtaaacaggacacggtacagtgtttttcctgtggtggatgtttaggaaattgggaagaaggagatgatccttggaaggaacatgccaaatggttccccaaatgtgaatttcttcggagtaagaaatcctcagaggaaattacccagtatattcaaagctacaagggatttgttgacataacgggagaacattttgtgaattcctgggtccagagagaattacctatggcatcagcttattgcaatgacagcatctttgcttacgaagaactacggctggactcttttaaggactggccccgggaatcagctgtgggagttgcagcactggccaaagcaggtcttttctacacaggtataaaggacatcgtccagtgcttttcctgtggagggtgtttagagaaatggcaggaaggtgatgacccattagacgatcacaccagatgttttcccaattgtccatttctccaaaatatgaagtcctctgcggaagtgactccagaccttcagagccgtggtgaactttgtgaattactggaaaccacaagtgaaagcaatcttgaagattcaatagcagttggtcctatagtgccagaaatggcacagggtgaagcccagtggtttcaagaggcaaagaatctgaatgagcagctgagagcagcttataccagcgccagtttccgccacatgtctttgcttgatatctcttccgatctggccacggaccacttgctgggctgtgatctgtctattgcttcaaaacacatcagcaaacctgtgcaagaacctctggtgctgcctgaggtctttggcaacttgaactctgtcatgtgtgtggagggtgaagctggaagtggaaagacggtcctcctgaagaaaatagcttttctgtgggcatctggatgctgtcccctgttaaacaggttccagctggttttctacctctcccttagttccaccagaccagacgaggggctggccagtatcatctgtgaccagctcctagagaaagaaggatctgttactgaaatgtgcatgaggaacattatccagcagttaaagaatcaggtcttattccttttagatgactacaaagaaatatgttcaatccctcaagtcataggaaaactgattcaaaaaaaccacttatcccggacctgcctattgattgctgtccgtacaaacagggccagggacatccgccgatacctagagaccattctagagatcaaagcatttcccttttataatactgtctgtatattacggaagctcttttcacataatatgactcgtctgcgaaagtttatggtttactttggaaagaaccaaagtttgcagaagatacagaaaactcctctcttngtggcggcgatctgtgctcattggtttcagtatccttttgacccatcctttgatgatgtggctgttttcaagtcctatatggaacgcctttccttaaggaacaaagcgacagctgaaattctcaaagcaactgtgtcctcctgtggtgagctggccttgaaagggtttttttcatgttgctttgagtttaatgatgatgatctcgcagaagcaggggttgatgaagatgaagatctaaccatgtgcttgatgagcaaatttacagcccagagactaagaccattctaccggtttttaagtcctgccttccaagaatttcttgcggggatgaggctgattgaactcctggattcagataggcaggaacatcaagatttgggactgtatcatttgaaacaaatcaactcacccatgatgactgtaagcgcctacaacaattttttgaactatgtctccagcctcccttcaacaaaagcagggcccaaaattgtgtctcatttgctccatttagtggataacaaagagtcattggagaatatatctgaaaatgatgactacttaaagcaccagccagaaatttcactgcagatgcagttacttaggggattgtggcaaatttgtccacaagcttacttttcaatggtttcagaacatttactggttcttgccctgaaaactgcttatcaaagcaacactgttgctgcgtgttctccatttgttttgcaattccttcaagggagaacactgactttgggtgcgcttaacttacagtactttttcgaccacccagaaagcttgtcattgttgaggagcatccacttcncaatacgaggaaataagacatcacccagagcacatttttcagttctggaaacatgttttgacaaatcacaggtgccaactatagatcaggactatgcttctgcctttgaacctatgaatgaatgggagngnnatttagctgaaaaagaggataatgtaaagagctatatggatatgcagcgcagggcatcaccagaccttagtactggctattggaaactttctccaaagcagtacaagattccctgtctagaagtcgatgtgaatgatattgatgttgtaggccaggatatgcttgagattctaatgacagttttctcagcttcacagcgcatcgaactccatttaaaccacagcagaggctttatagaaagcatccgcccagctcttgagctgtctaaggcctctgtcaccaagtgctccataagcaagttggaactcagcgcagccgaacaggaactgcttctcaccctgccttccctggaatctcttgaagtctcagggacaatccagtcacaagaccaaatctttcctaatctggataagttcctgtgcctgaaagaactgtctgtggatctggagggcaatataaatgttttttcagtcattcctgaagaatttccaaacttccaccatatggagaaattattgatccaaatttcagctgagtatgatccttccaaactagtaaaattaattcaaaattctccaaaccttcatgttttccatctgaagtgtaacttcttttcggattttgggtctctcatgactatgcttgtttcctgtaagaaactcacagaaattaagttttcggattcattttttcaagccgtcccatttgttgccagtttgccaaattttatttctctgaagatattaaatcttgaaggccagcaatttcctgatgaggaaacatcagaaaaatttgcctacattttaggttctcttagtaacctggaagaattgatccttcctactggggatggaatttatcgagtggccaaactgatcatccagcagtgtcagcagcttcattgtctccgagtcctctcatttttcaagactttgaatgatgacagcgtggtggaaattgccaaagtagcaatcagtggaggtttccagaaacttgagaacctaaagctttcaatcaatcacaagattacagaggaaggatacagaaatttctttcaagcactggacaacatgccaaacttgcaggagttggacatctccaggcatttcacagagtgtatcaaagctcaggccacaacagtcaagtctttgagtcaatgtgtgttacgactaccaaggctcattagactgaacatgttaagttggctcttggatgcagatgatattgcattgcttaatgtcatgaaagaaagacatcctcaatctaagtacttaactattctccagaaatggatactgccgttctctccaatcattcagaaataaaagattcagctaaaaactgctgaatcaataatttgtcttggggcatattgaggatgtaaaaaaagttgttgattaatgctaaaaaccaaattatccaaaattattttattaaatattgcatacaaaagaaaatgtgtaaggcttgctaaaaaacaaaacaaaacaaaacacagtcctgcatactcaccaccaagctcaagaaataaatcatcaccaatacctttgaggtccctgagtaatccaccccagctaaaggcaaacccttcaatcaagtttatacagcaaaccctccattgtccatggtcaacagggaaggggttggggacaggtctgccaatctatctaaaagccacaatatggaagaagtattcaatttatataataaatggctaacttaacggttgaatcactttcatacatggatgaaacgggtttaacacaggatccacatgaatcttctgtgggccaagagatgttccttaatccttgtagaacctgttttctatattgaactagctttggtacagtagagttaacttactttccatttatccactgccaatataaagaggaaacaggggttagggaaaaatgacttcattccagaggcttctcagagttcaacatatgctataatttagaattttcttatgaatccactctacttgggtagaaaatattttatctctagtgattgcatattatttccatatcatagtatttcatagtattatatttgatatgagtgtctatatcaatgtcagtgtccagaatttcgttcctaccagttaagtagttttctgaacggccagaagaccattcgaaattcatgatactactataagttggtaaacaaccatacttttatcctcatttttattctcactaagaaaaaagtcaactcccctccccttgcccaagtatgaaatatagggacagtatgtatggtgtggtctcatttgtttagaaaaccacttatgactgggtgcggtggctcacacctgtaatcccagcactttgggaggctgaggcgggcgaatcatttgaggtgaggaattcgagaccagcctggccagcatggtgaaaccccatctctactaaaaatacaaaaattagccaggtgtggtggcacatgcctgtngtcccagccactagggcggctgagacgcaagacttgcttgaacccgggaggcagaggttgcagtgagccaagatggcgccactgcattccagcctgggcaacagagcaagaccctgtctgtctcaaaacaaaaaacaaaaccacttatattgctagctacattaagaatttctgaatatgttactgagcttgcttgtggtaaccatttataatatcagaaagtatatgtacaccaaaacatgttgaacatccatgttgtacaactgaaatataaataattttgtcaattatacctaaataaaactggaaaaaaatttctggaagtttatatctaaaaatgttaatagtgcgtacctctaggaagtgggcctggaagccattcttacttttcagtctctcccattctgtactgttttttgttttactttcgtgcctgcattatttttctatttaaaacaaaaataaatctagtttagcactaaaatattaactggagctacctctggaggncanagagtactagaaggtgggatggattgtcttcttgcttgtctgattttatatgtaatacntttgtanttagaaaggttgttaagcattatatcagaatccagtcaggagacagaaaccacacagaaatttgantggggaaagtttnatatacagatgctcggccngncgcngtggcncnngcntgtantnccagcnactnngggaggcngaggtgggnnga

SEQ ID NO: 144 - DNA, 3092 bp, Homo sapiens
  misc_feature: polo-like kinase 4 (Drosophila)
tttcagcgtcgtcgcctggagcggcggtttagagaaccgagcctgatgggcgccaaggccggctggctgcttggagcgctgcctcgaagggcctgcgtgaaggaagctaatccggagaacccaggccagagcctggaaatatggcgacctgcatcggggagaagatcgaggattttaaagttggaaatctgcttggtaaaggatcatttgctggtgtctacagagctgagtccattcacactggtttggaagttgcaatcaaaatgatagataagaaagccatgtacaaagcaggaatggtacagagagtcaaaaatgaggtgaaaatacattgccaattgaaacatccttctatcttggagctttataactattttgaagatagcaattatgtgtatctggtattagaaatgtgccataatggagaaatgaacaggtatctaaagaatagagtgaaacccttctcagaaaatgaagctcgacacttcatgcaccagatcatcacagggatgttgtatcttcattctcatggtatactacaccgggacctcacactttctaacctcctactgactcgtaatatgaacatcaagattgctgattttgggctggcaactcaactgaaaatgccacatgaaaagcactatacattatgtggaactcctaactacatttcaccagaaattgccactcgaagtgcacatggccttgaatctgatgtttggtccctgggctgtatgttttatacattacttatcgggagaccacccttcgacactgacacagtcaagaacacattaaataaagtagtattggcagattatgaaatgccaacttttttgtcaatagaggccaaggaccttattcaccagttacttcgtagaaatccagcagatcgtttaagtctgtcttcagtattggaccatccttttatgtcccgaaattcttcaacaaaaagtaaagatttaggaactgtggaagactcaattgatagtgggcatgccacaatttctactgcaattacagcttcttccagtaccagtataagtggtagtttatttgacaaaagaagacttttgattggtcagccactcccaaataaaatgactgtatttccaaagaataaaagttcaactgatttttcttcttcaggagatggaaacagtttttatactcagtggggaaatcaagaaaccagtaatagtggaaggggaagagtaattcaagatgcagaagaaaggccacattctcgataccttcgtagagcttattcctctgatagatctggcacttctaatagtcagtctcaagcaaaaacatatacaatggaacgatgtcactcagcagaaatgctttcagtgtccaaaagatcaggaggaggtgaaaatgaagagaggtactcacccacagacaacaatgccaacatttttaacttctttaaagaaaagacatccagtagttctggatcttttgaaagacctgataacaatcaagcactctccaatcatctttgtccaggaaaaactccttttccatttgcagacccgacacctcagactgaaaccgtacaacagtggtttgggaatctgcaaataaatgctcatttaagaaaaactactgaatatgacagcatcagcccaaaccgggacttccagggccatccagatttgcagaaggacacatcaaaaaatgcctggactgatacaaaagtcaaaaagaactctgatgcttctgataatgcacattctgtaaaacagcaaaataccatgaaatatatgactgcacttcacagtaaacctgagataatccaacaagaatgtgtttttggctcagatcctctttctgaacagagcaagactaggggtatggagccaccatggggttatcagaatcgtacattaagaagcattacatctccgttggttgctcacaggttaaaaccaatcagacagaaaaccaaaaaggctgtggtgagcatacttgattcagaggaggtgtgtgtggagcttgtaaaggagtatgcatctcaagaatatgtgaaagaagttcttcagatatctagtgatggaaatacgatcactatttattatccaaatggtggtagaggttttcctcttgctgatagaccaccctcacctactgacaacatcagtaggtacagctttgacaatttaccagaaaaatactggcgaaaatatcaatatgcttccaggtttgtacagcttgtaagatctaaatctcccaaaatcacttattttacaagatatgctaaatgcattttgatggagaattctcctggtgctgattttgaggtttggttttatgatggggtaaaaatacacaaaacagaagatttcattcaggtgattgaaaagacagggaagtcttacactttaaaaagtgaaagtgaagttaatagcttgaaagaggagataaaaatgtttatggaccatgctaatgagggtcatcgtatttgtttagcactggaatccataatttcagaagaggaaaggaaaactaggagtgctccctttttcccaataatcataggaagaaaaccaggtagtactagttcacctaaggccttatcacctcctccttctgtggattcaaattacccaacgagagatagagcatctttcaacagaatggtcatgcatagtgctgcttctccaacacaggcaccaatccttaatccctctatggttacaaatgaaggacttggtcttacaactacagcttctggaacagacatctcttctaatagtctaaaagattgtcttcctaaatcagcacaacttttgaaatctgtttttgtgaaaaatgttggttgggctacacagttaactagtggagctgtgtgggttcagtttaatgatgggtcccagttggttgtgcaggcaggagtgtcttctatcagttatacctcaccaaatggtcaaacaactaggtatggagaaaatgaaaaattaccagactacatcaaacagaaattacagtgtctgtcttccatccttttgatgttttctaatccgactcctaattttcattgattaaaactcctttcagacatataagtttaataaataact

SEQ ID NO: 145 - DNA, 2906 bp, Homo sapiens
  misc_feature: mitogen-activated protein kinase kinase kinase kinase 2
gctccggcccgccccgctgcccggcccgcgcgccgggccatggagctgcgggatgtgtcgctgcaggacccgcgggaccgcttcgagctgctgcagcgcgtgggggccgggacctatggcgacgtctacaaggcccgcgacacggtcacgtccgaactggccgccgtgaagatagtcaagctagacccaggggacgacatcagctccctccagcaggaaatcaccatcctgcgtgagtgccgccaccccaatgtggtggcctacattggcagctacctcaggaatgaccgcttgtggatctgcatggagttctgcggagggggctccctgcaggagatttaccatgccactgggcccctggaggagcggcagattgcctacgtctgccgagagcgactgaaggggctccaccacctgcattctcaggggaagatccacagagacatcaagggagccaaccttctcctcactctccagggagatgtcaaactggctgactttggggtgtcaggcgagctgacagcgtctgtggccaagaggaggtctttcattgggactccctactggatggctcccgaggtggctgctgtggagcgcaaaggtggctacaatgagctatgtgacgtctgggccctgggcatcactgccattgagctgggcgagctgcagccccctctgttccacctgcaccccatgagggccctgatgctcatgtcgaagagcagcttccagccgcccaaactgagagataagactcgctggacccagaatttccaccactttctcaaactggccctgaccaagaatcctaagaagaggccgacagcagagaagctcctgcagcacccgttcacgactcagcagctccctcgggccctcctcacacagctgctggacaaagccagtgaccctcatctggggaccccctcccctgaggactgtgagctggagacctatgacatgtttccagacaccattcactcccgggggcagcacggcccagccgagaggaccccctcggagatccagtttcaccaggtgaaatttggcgccccacgcaggaaggaaactgacccactgaatgagccgtgggaggaagagtggacactactgggaaaggaagagttgagtgggagcctgctgcagtcggtccaggaggccctggaggaaaggagtctgactattcggtcagcctcagaattccaggagctggactccccagacgataccatgggaaccatcaagcgggccccgttcctagggccactccccactgaccctccagcagaggagcctctgtccagtcccccaggaaccctgcccccacctccttcaggccccaacagctccccactgctgcccacggcctgggccaccatgaagcagcgggaggatcctgagaggtcatcctgccacgggctccccccaactcccaaggtgcatatgggcgcctgcttctccaaggtcttcaatggctgccccctgcggatccacgctgctgtcacctggattcaccctgttactcgggaccagttcctggtggtaggggccgaggaaggcatctacacactcaacctgcatgaactgcatgaggatacgctggagaagctgatttcacatcgctgctcctggctctactgcgtgaacaacgtgctgctgtcactctcagggaaatccacgcacatctgggcccatgacctcccaggcctgtttgagcagcggaggctacagcaacaggttcccctctccatccccaccaaccgcctcacccagcgcatcatccccaggcgctttgctctgtccaccaagattcctgacaccaaaggctgcttgcagtgtcgtgtggtgcggaacccctacacgggtgccaccttcctgctggccgccctgcccaccagcctgctcctgctgcagtggtatgagccgctgcagaagtttctgctgctgaagaacttctccagccctctgcccagcccagctgggatgctggagccgctggtgctggatgggaaggagctgccgcaggtgtgtgttggggccgaggggcctgaggggcccggctgccgcgtcctgttccatgtcctgcccctggaggctggcctgacgcccgacatcctcatcccacctgaggggatcccaggctcggcccagcaggtgatccaggtggacagggacacaatcctagtcagctttgaacgctgtgtgaggattgtcaacatgcagggcgagcccacggccacactggcacctgagctgacctttgatttccccatcgagactgtggtgtgcctgcaggacagtgtgctggccttctggagccatgggatgcaaggccgaagcctggataccaatgaggtgacccaggagatcacagatgaaacaaggatcttccgagtgcttggggcccacagagacatcatcctggagagcattcccactgacaacccagaggcgcacagcaacctctacatcctcacgggccaccagagcacctactaagagcagcgggcctgtccaggctccccgccccaccccacgccttagctgcaggcccttttgggcaaaggggcccatcctagaccagaggagcccaggccctggccctgctggggctgaaggtcagaagtaatcctgagaaatgtttcaggcctggggagggaggggagcccccgacgcctctgcaataactggaccagggggagctgctgtcactcccccatccccgaggcagcccagtccctagtgcccaaggcagggaccctgggcctgggccatccattccattttgttccacatttcctttctactctttctgccaagagcctgcccctgcatttgtcctgggaaacacggtatttaagagagaactatattggtattaaagctggtttgttttaaaaaaaaaa

SEQ ID NO: 146 - DNA, 1670 bp, Homo sapiens
  misc_feature: myeloid cell nuclear differentiation antigen /// myeloid cell nuclear differentiation antigen
attgagagtggctctaacaagtgccatttttccttgttagctttcatttctcagccctttacaagattaaaatagtctgcagtttaatctctccaaagctttacggacagtgattctgtcctaaacaagacagtgactccaggatttctgaagactattgtggaagaagcatccattaaggccaagctataacatcagaaatggtgaatgaatacaagaaaattcttttgctgaaaggatttgagctcatggatgattatcattttacatcaattaagtccttactggcctatgatttaggactaactacaaaaatgcaagaggaatacaacagaattaagattacagatttgatggaaaaaaagttccaaggcgttgcctgtctagacaaactaatagaacttgccaaagatatgccatcacttaaaaaccttgttaacaatcttcgaaaagagaagtcaaaagttgctaagaaaattaaaacacaagaaaaagctccagtgaaaaaaataaaccaggaagaagtgggtcttgcggcacctgcacccaccgcaagaaacaaactgacatcggaagcaagagggaggattcctgtagctcagaaaagaaaaactccaaacaaagaaaagactgaagccaaaaggaataaggtgtcccaagagcagagtaagcccccaggtccctcaggagccagcacatctgcagctgtggatcatcccccactaccccagacctcatcatcaactccatccaacacttcgtttactccgaatcaggaaacccaggcccaacggcaggtggatgcaagaagaaatgttccccaaaacgacccagtgacagtggtggtactgaaagcaacagcgccatttaaatacgagtccccagaaaatgggaaaagcacaatgtttcatgctacagtggccagtaagactcaatatttccatgtgaaagtcttcgacatcaacttgaaagagaaatttgtaaggaagaaggtcattaccatatctgattactctgaatgtaaaggagtaatggaaataaaggaagcatcatctgtgtctgactttaatcaaaattttgaggtcccaaacagaattatcgaaatagcaaataaaactcccaagatcagtcaactttacaagcaagcatctggaacaatggtgtatgggttgtttatgttacaaaagaaaagcgtacacaagaagaacacaatttatgaaatacaggataatacaggatccatggatgtagtggggagtggaaaatggcacaatatcaagtgtgagaaaggagataaacttcgactcttctgccttcaactgagaacagttgaccgcaagctgaaactggtgtgtggaagtcacagcttcatcaaggtcatcaaggccaagaaaaacaaggaaggaccaatgaatgttaattgaaatatgaaagctgaaatgcaacaaacaacttccgcttaaaacaattaagttgttaataactgtgattttgtaaatttcagtaattcatttaaatgatgtttcagtagatatattctagcatattaagagcttttataactgagttatagattagtttgctttctggaataaaattttcttcttatactcttccttttttttagatattacattttgcttttatgacattcacgaggcaaaaaaccg

SEQ ID NO: 147 - DNA, 1389 bp, Homo sapiens
  misc_feature: centromere protein A, 17kDa
cgcggacttctgccaagcaccggctcatgtgaggctcgcggcacagcgttctctgggctccccagaagccagcctttcgctcccggacccggcagcccgagcaggagccgtgggaccgggcgccagcaccctctgcggcgtgtcatgggcccgcgccgccggagccgaaagcccgaggccccgaggaggcgcagcccgagcccgaccccgacccccggcccctcccggcggggcccctccttaggcgcttcctcccatcaacacagtcggcggagacaaggttggctaaaggagatccgaaagcttcagaagagcacacacctcttgataaggaagctgcccttcagccgcctggcaagagaaatatgtgttaaattcactcgtggtgtggacttcaattggcaagcccaggccctattggccctacaagaggcagcagaagcatttctagttcatctctttgaggacgcctatctcctcaccttacatgcaggccgagttactctcttcccaaaggatgtgcaactggcccggaggatccggggccttgaggagggactcggctgagctcctgcacccagtgtttctgtcagtctttcctgctcagccaggggggatgataccggggactctccagagccatgactagatccaatggattctgcgatgctgtctggactttgctgtctctgaacagtatgtgtgtgttgctttaaatatttttcttttttttgagaaggagaagactgcatgactttcctctgtaacagaggtaatatatgagacaatcaacaccgttccaaaggcctgaaaataattttcagataaagagactccaaggttgactttagtttgtgagttactcatgtgactatttgaggattttgaaaacatcagatttgctgtggtatgggagaaaaggttatgtacttattattttagctctttctgtaatatttacattttttaccatatgtacatttgtacttttattttacacataagggaaaaaataagaccactttgagcagttgcctggaaggctgggcatttccatcatatagacctctgcccttcagagtagcctcaccattagtggcagcatcatgtaactgagtggactgtgcttgtcaacggatgtgtagcttttcagaaacttaattggggatgaatagaaaacctgtaagctttgatgttctggttacttctagtaaattcctgtcaaaatcaattcagaaattctaacttggagaatttaacattttactcttgtaaatcatagaagatgtatcataacagttcagaattttaaagtacattttcgatgcttttatgggtatttttgtagtttctttgtagagagataataaaaatcaaaatatttaatga

SEQ ID NO: 148 - DNA, 4119 bp, Homo sapiens
  misc_feature: transforming growth factor, alpha
ctggagagcctgctgcccgcccgcccgtaaaatggtcccctcggctggacagctcgccctgttcgctctgggtattgtgttggctgcgtgccaggccttggagaacagcacgtccccgctgagtgcagacccgcccgtggctgcagcagtggtgtcccattttaatgactgcccagattcccacactcagttctgcttccatggaacctgcaggtttttggtgcaggaggacaagccagcatgtgtctgccattctgggtacgttggtgcacgctgtgagcatgcggacctcctggccgtggtggctgccagccagaagaagcaggccatcaccgccttggtggtggtctccatcgtggccctggctgtccttatcatcacatgtgtgctgatacactgctgccaggtccgaaaacactgtgagtggtgccgggccctcatctgccggcacgagaagcccagcgccctcctgaagggaagaaccgcttgctgccactcagaaacagtggtctgaagagcccagaggaggagtttggccaggtggactgtggcagatcaataaagaaaggcttcttcaggacagcactgccagagatgcctgggtgtgccacagaccttcctacttggcctgtaatcacctgtgcagccttttgtgggccttcaaaactctgtcaagaactccgtctgcttggggttattcagtgtgacctagagaagaaatcagcggaccacgatttcaagacttgttaaaaaagaactgcaaagagacggactcctgttcacctaggtgaggtgtgtgcagcagttggtgtctgagtccacatgtgtgcagttgtcttctgccagccatggattccaggctatatatttctttttaatgggccacctccccacaacagaattctgcccaacacaggagatttctatagttattgttttctgtcatttgcctactggggaagaaagtgaaggaggggaaactgtttaatatcacatgaagaccctagctttaagagaagctgtatcctctaaccacgagactctcaaccagcccaacatcttccatggacacatgacattgaagaccatcccaagctatcgccacccttggagatgatgtcttatttattagatggataatggttttatttttaatctcttaagtcaatgtaaaaagtataaaaccccttcagacttctacattaatgatgtatgtgttgctgactgaaaagctatactgattagaaatgtctggcctcttcaagacagctaaggcttgggaaaagtcttccagggtgcggagatggaaccagaggctgggttactggtaggaataaaggtaggggttcagaaatggtgccattgaagccacaaagccggtaaatgcctcaatacgttctgggagaaaacttagcaaatccatcagcagggatctgtcccctctgttggggagagaggaagagtgtgtgtgtctacacaggataaacccaatacatattgtactgctcagtgattaaatgggttcacttcctcgtgagccctcggtaagtatgtttagaaatagaacattagccacgagccataggcatttcaggccaaatccatgaaagggggaccagtcatttattttccattttgttgcttggttggtttgttgctttatttttaaaaggagaagtttaactttgctatttattttcgagcactaggaaaactattccagtaatttttttttcctcatttccattcaggatgccggctttattaacaaaaactctaacaagtcacctccactatgtgggtcttcctttcccctcaagagaaggagcaattgttcccctgacatctgggtccatctgacccatggggcctgcctgtgagaaacagtgggtcccttcaaatacatagtggatagctcatccctaggaattttcattaaaatttggaaacagagtaatgaagaaataatatataaactccttatgtgaggaaatgctactaatatctgaaaagtgaaagatttctatgtattaactcttaagtgcacctagcttattacatcgtgaaaggtacatttaaaatatgttaaattggcttgaaattttcagagaattttgtcttcccctaattcttcttccttggtctggaagaacaatttctatgaattttctctttattttttttttataattcagacaattctatgacccgtgtcttcatttttggcactcttatttaacaatgccacacctgaagcacttggatctgttcagagctgaccccctagcaacgtagttgacacagctccaggtttttaaattactaaaataagttcaagtttacatcccttgggccagatatgtgggttgaggcttgactgtagcatcctgcttagagaccaatcaatggacactggtttttagacctctatcaatcagtagttagcatccaagagactttgcagaggcgtaggaatgaggctggacagatggcggaacgagaggttccctgcgaagacttgagatttagtgtctgtgaatgttctagttcctaggtccagcaagtcacacctgccagtgccctcatccttatgcctgtaacacacatgcagtgagaggcctcacatatacgcctccctagaagtgccttccaagtcagtcctttggaaaccagcaggtctgaaaaagaggctgcatcaatgcaagcctggttggaccattgtccatgcctcaggatagaacagcctggcttatttggggatttttcttctagaaatcaaatgactgataagcattggctccctctgccatttaatggcaatggtagtctttggttagctgcaaaaatactccatttcaagttaaaaatgcatcttctaatccatctctgcaagctccctgtgtttccttgccctttagaaaatgaattgttcactacaattagagaatcatttaacatcctgacctggtaagctgccacacacctggcagtggggagcatcgctgtttccaatggctcaggagacaatgaaaagcccccatttaaaaaaataacaaacattttttaaaaggcctccaatactcttatggagcctggatttttcccactgctctacaggctgtgactttttttaagcatcctgacaggaaatgttttcttctacatggaaagatagacagcagccaaccctgatctggaagacagggccccggctggacacacgtggaaccaagccagggatgggctggccattgtgtccccgcaggagagatgggcagaatggccctagagttcttttccctgagaaaggagaaaaagatgggattgccactcacccacccacactggtaagggaggagaatttgtgcttctggagcttctcaagggattgtgttttgcaggtacagaaaactgcctgttatcttcaagccaggttttcgagggcacatgggtcaccagttgctttttcagtcaatttggccgggatggactaatgaggctctaacactgctcaggagacccctgccctctagttggttctgggctttgatctcttccaacctgcccagtcacagaaggaggaatgactcaaatgcccaaaaccaagaacacattgcagaagtaagacaaacatgtatatttttaaatgttctaacataagacctgttctctctagccattgatttaccaggctttctgaaagatctagtggttcacacagagagagagagagtactgaaaaagcaactcctcttcttagtcttaataatttactaaaatggtcaacttttcattatctttattataataaacctgatgcttttttttagaactccttactctgatgtctgtatatgttgcactgaaaaggttaatatttaatgttttaatttattttgtgtggtaagttaattttgatttctgtaatgtgttaatgtgattagcagttattttccttaatatctgaattatacttaaagagtagtgagcaatataagacgcaattgtgtttttcagtaatgtgcattgttattgagttgtactgtaccttatttggaaggatgaaggaatgaacctttttttcctaaaaaaaaaaaaaaaaaaaaaaaaaaaaaaaaa

SEQ ID NO: 149 - DNA, 1645 bp, Homo sapiens
  misc_feature: RAD51 homolog (RecA homolog, E. coli) (S. cerevisiae)
gaattccggtaaggagagtgcggcgcttcccgaggcgtgcagctgggaactgcaactcatctgggttgtgcgcagaaggctggggcaagcgagtagagaagtggagcgtaagccagggggcttgggggccgtgcgggcgggtcgcgtgcagccccgcggggtgaagtcggagcgcggggcctgctggagagaggagcgctgcgaccgagtaatggcaatgcagatgcagcttgaagcaaatgcagatacttcagtggaagaagaaagctttggcccacaacccatttcacggttagagcagtgtggcataaatgccaacgatgtgaagaaattggaagaagctggattccatactgtggaggctgttgcctatgcgccaaagaaggagctaataaatattaagggaattagtgaagccaaagctgataaaattctggctgaggcagctaaattagttccaatgggtttcaccactgcaactgaattccaccaaaggcggtcagagatcatacagattactactggctccaaagagcttgacaaactacttcaaggtggaattgagactggatctatcacagaaatgtttggagaattccgaactgggaagacccagatctgtcatacgctagctgtcacctgccagcttcccattgaccggggtggaggtgaaggaaaggccatgtacattgacactgagggtacctttaggccagaacggctgctggcagtggctgagaggtatggtctctctggcagtgatgtcctggataatgtagcatatgctcgagcgttcaacacagaccaccagacccagctcctttatcaagcatcagccatgatggtagaatctaggtatgcactgcttattgtagacagtgccaccgccctttacagaacagactactcgggtcgaggtgagctttcagccaggcagatgcacttggccaggtttctgcggatgcttctgcgactcgctgatgagtttggtgtagcagtggtaatcactaatcaggtggtagctcaagtggatggagcagcgatgtttgctgctgatcccaaaaaacctattggaggaaatatcatcgcccatgcatcaacaaccagattgtatctgaggaaaggaagaggggaaaccagaatctgccaaatctacgactctccctgtcttcctgaagctgaagctatgttcgccattaatgcagatggagtgggagatgccaaagactgaatcattgggtttttcctctgttaaaaaccttaagtgctgcagcctaatgagagtgcactgctccctggggttctctacaggcctcttcctgttgtgactgccaggataaagcttccgggaaaacagctattatatcagcttttctgatggtataaacaggagacaggtcagtagtcacaaactgatctaaaatggtttattccttctgtagtgtattaatctctgtgtgttttctttggttttggaggagggtatgaagtatctttgacatggtgccttaggaatgacttgggtttaacaagctgtctactggacaatcttatgtttccaagagaactaaagctggagagacctgacccttctctcacttctaaattaatggtaaaataaaagtcctcagctatgtagcaaagg

SEQ ID NO: 150 - DNA, 8257 bp, Homo sapiens
  misc_feature: centromere protein E, 312kDa
taaatttaaaggcggggcggcctgtgagccctgaagtgccggccgcggagggtcctggccattttggtgggaccagttcagcctgataggatggcggaggaaggagccgtggccgtctgcgtgcgagtgcggccgctgaacagcagagaagaatcacttggagaaactgcccaagtttactggaaaactgacaataatgtcatttatcaagttgatggaagtaaatccttcaattttgatcgtgtctttcatggtaatgaaactaccaaaaatgtgtatgaagaaatagcagcaccaatcatcgattctgccatacaaggctacaatggtactatatttgcctatggacagactgcttcaggaaaaacatataccatgatgggttcagaagatcatttgggagttatacccagggcaattcatgacattttccaaaaaattaagaagtttcctgatagggaatttctcttacgtgtatcttacatggaaatatacaatgaaaccattacagatttactctgtggcactcaaaaaatgaaacctttaattattcgagaagatgtcaataggaatgtgtatgttgctgatctcacagaagaagttgtatatacatcagaaatggctttgaaatggattacaaagggagaaaagagcaggcattatggagaaacaaaaatgaatcaaagaagcagtcgttctcataccatctttaggatgattttggaaagcagagagaagggtgaaccttctaattgtgaaggatctgttaaggtatcccatttgaatttggttgatcttgcaggcagtgaaagagctgctcaaacaggcgctgcaggtgtgcggctcaaggaaggctgtaatataaatcgaagcttatttattttgggacaagtgatcaagaaacttagtgatggacaagttggtggtttcataaattatcgagatagcaagttaacacgaattcttcagaattccttgggaggaaatccaaagacacgtattatctgcacaattactccagtatcttttgatgaaactcttactgctctccagtttgccagtactgctaaatatatgaagaatactccttatgttaatgaggtatcaactgatgaagctctcctgaaaaggtatagaaaagaaataatggatcttaaaaaacaattagaggaggtttctttagagacgcgggctcaggcaatggaaaaagaccaattggcccaacttttggaagaaaaagatttgcttcagaaagtacagaatgagaaaattgaaaacttaacacggatgctggtgacctcttcttccctcacgttgcaacaggaattaaaggctaaaagaaaacgaagagttacttggtgccttggcaaaattaacaaaatgaagaactcaaactatgcagatcaatttaatataccaacaaatataacaacaaaaacacataagctttctataaatttattacgagaaattgatgaatctgtctgttcagagtctgatgttttcagtaacactcttgatacattaagtgagatagaatggaatccagcaacaaagctactaaatcaggagaatatagaaagtgagttgaactcacttcgtgctgactatgataatctggtattagactatgaacaactacgaacagaaaaagaagaaatggaattgaaattaaaagaaaagaatgatttggatgaatttgaggctctagaaagaaaaactaaaaaagatcaagagatgcaactaattcatgaaatttcgaacttaaagaatttagttaagcatcgagaagtatataatcaagatcttgagaatgaactcagttcaaaagtagagctgcttagagaaaaggaagaccagattaagaagctacaggaatacatagactctcaaaagctagaaaatataaaaatggacttgtcatactcattggaaagcattgaagacccaaaacaaatgaagcagactctgtttgatgctgaaactgtagcccttgatgccaagagagaatcagcctttcttagaagtgaaaatctggagttgaaggagaaaatgaaagaacttgcaactacatacaagcaaatggaaaatgatattcagttatatcaaagccaattggaggcaaaaaagaaaatgcaagttgatctggagaaagaattacaatctgcttttaatgagataacaaaactcacctcccttatagatggcaaagttccaaaagatttgctctgtaatttggaattggaaggaaagattactgatcttcagaaagaactaaataaagaagttgaagaaaatgaagctttgcgggaagaagtcattttgctttcagaattgaaatctttaccttctgaagtagaaaggctgaggaaagagatacaagacaaatctgaagagctccatataataacatcagaaaaagataaattgttttctgaagtagttcataaggagagtagagttcaaggtttacttgaagaaattgggaaaacaaaagatgacctagcaactacacagtcgaattataaaagcactgatcaagaattccaaaatttcaaaacccttcatatggactttgagcaaaagtataagatggtccttgaggagaatgagagaatgaatcaggaaatagttaatctctctaaagaagcccaaaaatttgattcgagtttgggtgctttgaagaccgagctttcttacaagacccaagaacttcaggagaaaacacgtgaggttcaagaaagactaaatgagatggaacagctgaaggaacaattagaaaatagagattctccgctgcaaactgtagaaagggagaaaacactgattactgagaaactgcagcaaactttagaagaagtaaaaactttaactcaagaaaaagatgatctaaaacaactccaagaaagcttgcaaattgagagggaccaactcaaaagtgatattcacgatactgttaacatgaatatagatactcaagaacaattacgaaatgctcttgagtctctgaaacaacatcaagaaacaattaatacactaaaatcgaaaatttctgaggaagtttccaggaatttgcatatggaggaaaatacaggagaaactaaagatgaatttcagcaaaagatggttggcatagataaaaaacaggatttggaagctaaaaatacccaaacactaactgcagatgttaaggataatgagataattgagcaacaaaggaagatattttctttaatacaggagaaaaatgaactccaacaaatgttagagagtgttatagcagaaaaggaacaattgaagactgacctaaaggaaaatattgaaatgaccattgaaaaccaggaagaattaagacttcttggggatgaacttaaaaagcaacaagagatagttgcacaagaaaagaaccatgccataaagaaagaaggagagctttctaggacctgtgacagactggcagaagttgaagaaaaactaaaggaaaagagccagcaactccaagaaaaacagcaacaacttcttaatgtacaagaagagatgagtgagatgcagaaaaagattaatgaaatagagaatttaaagaatgaattaaagaacaaagaattgacattggaacatatggaaacagagaggcttgagttggctcagaaacttaatgaaaattatgaggaagtgaaatctataaccaaagaaagaaaagttctaaaggaattacagaagtcatttgaaacagagagagaccaccttagaggatatataagagaaattgaagctacaggcctacaaaccaaagaagaactaaaaattgctcatattcacctaaaagaacaccaagaaactattgatgaactaagaagaagcgtatctgagaagacagctcaaataataaatactcaggacttagaaaaatcccataccaaattacaagaagagatcccagtgcttcatgaggaacaagagttactgcctaatgtgaaaaaagtcagtgagactcaggaaacaatgaatgaactggagttattaacagaacagtccacaaccaaggactcaacaacactggcaagaatagaaatggaaaggctcaggttgaatgaaaaatttcaagaaagtcaggaagagataaaatctctaaccaaggaaagagacaaccttaaaacgataaaagaagcccttgaagttaaacatgaccagctgaaagaacatattagagaaactttggctaaaatccaggagtctcaaagcaaacaagaacagtccttaaatatgaaagaaaaagacaatgaaactaccaaaatcgtgagtgagatggagcaattcaaacccaaagattcagcactactaaggatagaaatagaaatgctcggattgtccaaaagacttcaagaaagtcatgatgaaatgaaatctgtagctaaggagaaagatgacctacagaggctgcaagaagttcttcaatctgaaagtgaccagctcaaagaaaacataaaagaaattgtagctaaacacctggaaactgaagaggaacttaaagttgctcattgttgcctgaaagaacaagaggaaactattaatgagttaagagtgaatctttcagagaaggaaactgaaatatcaaccattcaaaagcagttagaagcaatcaatgataaattacagaacaagatccaagagatttatgagaaagaggaacaacttaatataaaacaaattagtgaggttcaggaaaacgtgaatgaactgaaacaattcaaggagcatcgcaaagccaaggattcagcactacaaagtatagaaagtaagatgctcgagttgaccaacagacttcaagaaagtcaagaagaaatacaaattatgattaaggaaaaagaggaaatgaaaagagtacaggaggcccttcagatagagagagaccaactgaaagaaaacactaaagaaattgtagctaaaatgaaagaatctcaagaaaaagaatatcagtttcttaagatgacagctgtcaatgagactcaggagaaaatgtgtgaaatagaacacttgaaggagcaatttgagacccagaagttaaacctggaaaacatagaaacggagaatataaggttgactcagatactacatgaaaaccttgaagaaatgagatctgtaacaaaagaaagagatgaccttaggagtgtggaggagactctcaaagtagagagagaccagctcaaggaaaaccttagagaaactataactagagacctagaaaaacaagaggagctaaaaattgttcacatgcatctgaaggagcaccaagaaactattgataaactaagagggattgtttcagagaaaacaaatgaaatatcaaatatgcaaaaggacttagaacactcaaatgatgccttaaaagcacaggatctgaaaatacaagaggaactaagaattgctcacatgcatctgaaagagcagcaggaaactattgacaaactcagaggaattgtttctgagaagacagataaactatcaaatatgcaaaaagatttagaaaattcaaatgctaaattacaagaaaagattcaagaacttaaggcaaatgaacatcaacttattacgttaaaaaaagatgtcaatgagacacagaaaaaagtgtctgaaatggagcaactaaagaaacaaataaaagaccaaagcttaactctgagtaaattagaaatagagaatttaaatttggctcaagaacttcatgaaaaccttgaagaaatgaaatctgtaatgaaagaaagagataatctaagaagagtagaggagacactcaaactggagagagaccaactcaaggaaagcctgcaagaaaccaaagctagagatctggaaatacaacaggaactaaaaactgctcgtatgctatcaaaagaacacaaagaaactgttgataaacttagagaaaaaatttcagaaaagacaattcaaatttcagacattcaaaaggatttagataaatcaaaagatgaattacagaaaaagatccaagaacttcagaaaaaagaacttcaactgcttagagtgaaagaagatgtcaatatgagtcataaaaaaattaatgaaatggaacagttgaagaagcaatttgagccaaactatctatgcaagtgtgagatggataacttccagttgactaagaaacttcatgaaagccttgaagaaataagaattgtagctaaagaaagagatgagctaaggaggataaaagaatctctcaaaatggaaagggaccaattcatagcaaccttaagggaaatgatagctagagaccgacagaaccaccaagtaaaacctgaaaaaaggttactaagtgatggacaacagcaccttatggaaagcctgagagaaaagtgctctagaataaaagagcttttgaagagatactcagagatggatgatcattatgagtgcttgaatagattgtctcttgacttggagaaggaaattgaattccacagaatcatgaagaaactgaagtatgtgttaagctatgttacaaaaataaaagaagaacaacatgaatgcatcaataaatttgaaatggattttattgatgaagtggaaaagcaaaaggaattgctaattaaaatacagcaccttcaacaagattgtgatgtaccatccagagaattaagggatctcaaattgaaccagaatatggatctacatattgaggaaattctcaaagatttctcagaaagtgagttccctagcataaagactgaatttcaacaagtactaagtaataggaaagaaatgacacagtttttggaagagtggttaaatactcgttttgatatagaaaagcttaaaaatggcatccagaaagaaaatgataggatttgtcaagtgaataacttctttaataacagaataattgccataatgaatgaatcaacagagtttgaggaaagaagtgctaccatatccaaagagtgggaacaggacctgaaatcactgaaagagaaaaatgaaaaactatttaaaaactaccaaacattgaagacttccttggcatctggtgcccaggttaatcctaccacacaagacaataagaatcctcatgttacatcaagagctacacagttaaccacagagaaaattcgagagctggaaaattcactgcatgaagctaaagaaagtgctatgcataaggaaagcaagattataaagatgcagaaagaacttgaggtgactaatgacataatagcaaaacttcaagccaaagttcatgaatcaaataaatgccttgaaaaaacaaaagagacaattcaagtacttcaggacaaagttgctttaggagctaagccatataaagaagaaattgaagatctcaaaatgaagcttgtgaaaatagacctagagaaaatgaaaaatgccaaagaatttgaaaaggaaatcagtgctacaaaagccactgtagaatatcaaaaggaagttataaggctattgagagaaaatctcagaagaagtcaacaggcccaagatacctcagtgatatcagaacatactgatcctcagccttcaaataaacccttaacttgtggaggtggcagcggcattgtacaaaacacaaaagctcttattttgaaaagtgaacatataaggctagaaaaagaaatttctaagttaaagcagcaaaatgaacagctaataaaacaaaagaatgaattgttaagcaataatcagcatctttccaatgaggtcaaaacttggaaggaaagaacccttaaaagagaggctcacaaacaagtaacttgtgagaattctccaaagtctcctaaagtgactggaacagcttctaaaaagaaacaaattacaccctctcaatgcaaggaacggaatttacaagatcctgtgccaaaggaatcaccaaaatcttgtttttttgatagccgatcaaagtctttaccatcacctcatccagttcgctattttgataactcaagtttaggcctttgtccagaggtgcaaaatgcaggagcagagagtgtggattctcagccaggtccttggcacgcctcctcaggcaaggatgtgcctgagtgcaaaactcagtagactcctctttgtcacttctctggagatccagcattccttatttggaaatgactttgtttatgtgtctatccctggtaatgatgttgtagtgcagcttaatttcaattcagtctttactttgccactagagttgaaagataagggaacaggaaatgaatgcattgtggtaatttag

SEQ ID NO: 151 - DNA, 3153 bp, Homo sapiens
  misc_feature: origin recognition complex, subunit 1-like (yeast)
ccggggccacgcgattggcgcgaagttttcttttctccttccaccttcttttcatttctagtgagacacacgctttggtcctggctttcggcccgtagttgtagaaggagccctgctggtgcaggttagaggtgccgcatcccccggagctctcgaagtggaggcggtaggaaacggagggcttgcggctagccggaggaagctttggagccggaagccatggcacactaccccacaaggctgaagaccagaaaaacttattcatgggttggcaggcccttgttggatcgaaaactgcactaccaaacctatagagaaatgtgtgtgaaaacagaaggttgttccaccgagattcacatccagattggacagtttgtgttgattgaaggggatgatgatgaaaacccgtatgttgctaaattgcttgagttgttcgaagatgactctgatcctcctcctaagaaacgtgctcgagtacagtggtttgtccgattctgtgaagtccctgcctgtaaacggcatttgttgggccggaagcctggtgcacaggaaatattctggtatgattacccggcctgtgacagcaacattaatgcggagaccatcattggccttgttcgggtgatacctttagccccaaaggatgtggtaccgacgaatctgaaaaatgagaagacactctttgtgaaactatcctggaatgagaagaaattcaggccactttcctcagaactatttgcggagttgaataaaccacaagagagtgcagccaagtgccagaaacccgtgagagccaagagtaagagtgcagagagcccttcttggaccccagcagaacatgtggccaaaaggattgaatcaaggcactccgcctccaaatctcgccaaactcctacccatcctcttaccccaagagccagaaagaggctggagcttggcaacttaggtaaccctcagatgtcccagcagacttcatgtgcctccttggattctccaggaagaataaaacggaaagtggccttctcggagatcacctcaccttctaagagatctcagcctgataaacttcaaaccttgtctccagctctgaaagccccagagaaaaccagagagactggactctcttatactgaggatgacaagaaggcttcacctgaacatcgcataatcctgagaacccgaattgcagcttcgaaaaccatagacattagagaggagagaacacttacccctatcagtgggggacagagatcttcagtggtgccatccgtgattctgaaaccagaaaacatcaaaaagagggatgcaaaagaagcaaaagcccagaatgaagcgacctctactccccatcgtatccgcagaaagagttctgtcttgactatgaatcggattaggcagcagcttcggtttctaggtaatagtaaaagtgaccaagaagagaaagagattctgccagcagcagagatttcagactctagcagtgacgaagaagaggcttccacaccgccccttccaaggagagcacccagaactgtgtccaggaacctgcgatcttccttgaagtcatccttacataccctcacgaaggtgccaaagaagagtctcaagcctagaacgccacgttgtgccgctcctcagatccgtagtcgaagcctggctgcccaggagccagccagtgtgctggaggaagcccgactgaggctgcatgtttctgctgtacctgagtctcttccctgtcgggaacaggaattccaagacatctacaattttgtggaaagcaaactccttgaccataccggagggtgcatgtacatctccggtgtccctgggacagggaagactgccactgttcatgaagtgatacgctgcctgcagcaggcagcccaagccaatgatgttcctccctttcaatacattgaggtcaatggcatgaagctgacggagccccaccaagtctatgtgcacatcttgcagaagctaacaggccaaaaagcaacagccaaccatgcggcagaactgctggcaaagcaattctgcacccgagggtcacctcaggaaaccaccgtcctgcttgtggatgagctcgaccttctgtggactcacaaacaagacataatgtacaatctctttgactggcccactcataaggaggcccggcttgtggtcctggcaattgccaacacaatggacctgccagagcgaatcatgatgaaccgggtgtccagccgactgggtcttaccaggatgtgcttccagccctatacatatagccagctgcagcagatcctaaggtcccggctcaagcatctaaaggcctttgaagatgatgccatccagctggtagccaggaaggtagcagcactgtctggagatgcacgacggtgcctggacatctgcaggcgtgccacagagatctgtgagttctcccagcagaagcctgactcccctggcctggtcaccatagcccactcaatggaagctgtggatgagatgttttcatcatcatacatcacggccatcaaaaattcctctgttctggaacagagcttcctgagagccatcctcgcagagttccgtcgatcaggactggaggaagccacgtttcaacagatatatagtcaacatgtggcactgtgcagaatggagggactgccgtaccccaccatgtcagagaccatggccgtgtgttctcacctgggctcctgtcgcctcctgcttgtggagcccagcaggaacgatctgctccttcgggtgcggctcaacgtcagccaggatgatgtgctgtatgcgctgaaagacgagtaaaggggcttcacaagttaaaagactggggtcttgctgggttttgttttttgagacagggtcttgctctgtcgcccaggctggagtgcagtggcacgatcatggctcactgcagccttgacttctcaggcttaggtgaccccccaacctcatcctcccaggtggctgaaactacaggcacatgccaccatgcccagctgattttttgtagagacagggcttcaccatgttgccaagctagtctacaaagcatctgattttggaagtacatggaattgttgtaacaaagtatattgaatggaaatggctctcatgtattttggaattttccattaaataatttgcttttta

SEQ ID NO: 152 - DNA, 2684 bp, Homo sapiens
  misc_feature: chemokine (C-C motif) receptor 1
  misc_feature (1504)..(1504): n is a, c, g, or t
  misc_feature (1615)..(1615): n is a, c, g, or t
  misc_feature (2669)..(2670): n is a, c, g, or t
ggcacgagcccagaaacaaagacttcacggacaaagtcccttggaaccagagagaagccgggatggaaactccaaacaccacagaggactatgacacgaccacagagtttgactatggggatgcaactccgtgccagaaggtgaacgagagggcctttggggcccaactgctgccccctctgtactccttggtatttgtcattggcctggttggaaacatcctggtggtcctggtccttgtgcaatacaagaggctaaaaaacatgaccagcatctacctcctgaacctggccatttctgacctgctcttcctgttcacgcttcccttctggatcgactacaagttgaaggatgactgggtttttggtgatgccatgtgtaagatcctctctgggttttattacacaggcttgtacagcgagatctttttcatcatcctgctgacgattgacaggtacctggccatcgtccacgccgtgtttgccttgcgggcacggaccgtcacttttggtgtcatcaccagcatcatcatttgggccctggccatcttggcttccatgccaggcttatacttttccaagacccaatgggaattcactcaccacacctgcagccttcactttcctcacgaaagcctacgagagtggaagctgtttcaggctctgaaactgaacctctttgggctggtattgcctttgttggtcatgatcatctgctacacagggattataaagattctgctaagacgaccaaatgagaagaaatccaaagctgtccgtttgatttttgtcatcatgatcatcttttttctcttttggaccccctacaatttgactatacttatttctgttttccaagacttcctgttcacccatgagtgtgagcagagcagacatttggacctggctgtgcaagtgacggaggtgatcgcctacacgcactgctgtgtcaacccagtgatctacgccttcgttggtgagaggttccggaagtacctgcggcagttgttccacaggcgtgtggctgtgcacctggttaaatggctccccttcctctccgtggacaggctggagagggtcagctccacatctccctccacaggggagcatgaactctctgctgggttctgactcagaccataggaggccaacccaaaataagcaggcgtgacctgccaggcacactgagccagcagcctggctctcccagccaggttctgactcttggcacagcatggagtcacagccacttgggatagagagggaatgtaatggtggcctggggcttctgaggcttctggggcttcagtcttttccatgaacttctcccctggtagaaaagaagatgaatgagcaaaaccaaatattccagagactgggactaagtgtaccagagaagggcttggactcaagcaagatttcagatttgtgaccattagcatttgtcaacaaagtcacccacttcccactattgcttgcacaaaccaattaaacccagtagtggntgactgtgggctccattcaaagtgagctcctaagccatgggagacactgatgtatgaggaatttctgttcttccatcacctccccccccccgccaccctcccactgccaangaacttggaaatagtgatttccacagtgactccactctgagtcccagagccaatcagtagccagcatctgcctccccttcactcccaccgcaggatttgggctcttggaatcctggggaacatagaactcatgacggaagagttgagacctaacgagaaatagaaatgggggaactactgctggcagtggaactaagaaagcccttaggaagaatttttatatccactaaaatcaaacaattcagggagtgggctaagcacgggccatatgaataacatggtgtgcttcttaaaatagccataaaggggagggactcatcatttccatttacccttcttttctgactatttttcagaatctctcttcttttcaagttgggtgatatgttggtagattctaatggctttattgcagcgattaataacaggcaaaaggaagcagggttggtttcccttctttttgttcttcatctaagccttctggttttatgggtcagagttccgactgccatcttggacttgtcagcaaaaaaaaaaaataataataataataaggcctgctgtgtaagctgacagtatttgtagctgatagggggttgggaggaaagtgtctactaggagggtggggtgagattctgtgttgatgtaggaggccgagaaggcccttaactcaaagtagcttatttatccaaaatgttctggatgcatcatctccaaccaaggaccccttatttatcatgcctttgttctcttttccctcagatgtatatttctttaaaaataattttcctaataacaaaacttatttctaaaacagcttaaaaattcaaagaaaaaccccaaacactgacattacctacacttccactacccaaagacaaaatgtgcccactgtgtgcttttgagtgtattttcttttagtttgttttttgttgggtgcatatttatgataataacaatgatggacttcaattgtactcactgttctattgttggttttaattagcagcaagttgtgatcactttcccaggtgaataaatcatttcaaagcannaaaaaaaaaaaaaa

SEQ ID NO: 153 - DNA, 1281 bp, Homo sapiens
  misc_feature: formyl peptide receptor 1 /// formyl peptide receptor 1
cccagacctagaactacccagagcaagaccacagctggtgaacagtccaggagcagacaagatggagacaaattcctctctccccacgaacatctctggagggacacctgctgtatctgctggctatctcttcctggatatcatcacttatctggtatttgcagtcacctttgtcctcggggtcctgggcaacgggcttgtgatctgggtggctggattccggatgacacacacagtcaccaccatcagttacctgaacctggccgtggctgacttctgtttcacctccactttgccattcttcatggtcaggaaggccatgggaggacattggcctttcggctggttcctgtgcaaattcgtctttaccatagtggacatcaacttgttcggaagtgtcttcctgatcgccctcattgctctggaccgctgtgtttgcgtcctgcatccagtctggacccagaaccaccgcaccgtgagcctggccaagaaggtgatcattgggccctgggtgatggctctgctcctcacattgccagttatcattcgtgtgactacagtacctggtaaaacggggacagtagcctgcacttttaacttttcgccctggaccaacgaccctaaagagaggataaatgtggccgttgccatgttgacggtgagaggcatcatccggttcatcattggcttcagcgcacccatgtccatcgttgctgtcagttatgggcttattgccaccaagatccacaagcaaggcttgattaagtccagtcgtcccttacgggtcctctcctttgtcgcagcagccttttttctctgctggtccccatatcaggtggtggcccttatagccacagtcagaatccgtgagttattgcaaggcatgtacaaagaaattggtattgcagtggatgtgacaagtgccctggccttcttcaacagctgcctcaaccccatgctctatgtcttcatgggccaggacttccgggagaggctgatccacgcccttcccgccagtctggagagggccctgaccgaggactcaacccaaaccagtgacacagctaccaattctactttaccttctgcagaggtggagttacaggcaaagtgaggagggagctgggggacactttcgagctcccagctccagcttcgtctcaccttgagttaggctgagcacaggcatttcctgcttattttaggattacccactcatcagaaaaaaaaaaaaaagcctttgtgtcccctgatttggggagaataaacagatatgagttt

SEQ ID NO: 154 - DNA, 2115 bp, Homo sapiens
  misc_feature: cell division cycle 25C
ggtcaacgcctgcggctgttgatattcttgctcagaggccgtaactttggccttctgctcagggaagactctgagtccgacgttggcctacccagtcggaaggcagagctgcaatctagttaactacctcctttcccctagatttcctttcattctgctcaagtcttcgcctgtgtccgatccctatctactttctctcctcttgtagcaagcctcagactccaggcttgagctaggttttgtttttctcctggtgagaattcgaagaccatgtctacggaactcttctcatccacaagagaggaaggaagctctggctcaggacccagttttaggtctaatcaaaggaaaatgttaaacctgctcctggagagagacacttcctttaccgtctgtccagatgtccctagaactccagtgggcaaatttcttggtgattctgcaaacctaagcattttgtctggaggaaccccaaaatgttgcctcgatctttcgaatcttagcagtggggagataactgccactcagcttaccacttctgcagaccttgatgaaactggtcacctggattcttcaggacttcaggaagtgcatttagctgggatgaatcatgaccagcacctaatgaaatgtagcccagcacagcttctttgtagcactccgaatggtttggaccgtggccatagaaagagagatgcaatgtgtagttcatctgcaaataaagaaaatgacaatggaaacttggtggacagtgaaatgaaatatttgggcagtcccattactactgttccaaaattggataaaaatccaaacctaggagaagaccaggcagaagagatttcagatgaattaatggagttttccctgaaagatcaagaagcaaaggtgagcagaagtggcctatatcgctccccgtcgatgccagagaacttgaacaggccaagactgaagcaggtggaaaaattcaaggacaacacaataccagataaagttaaaaaaaagtatttttctggccaaggaaagctcaggaagggcttatgtttaaagaagacagtctctctgtgtgacattactatcactcagatgctggaggaagattctaaccaggggcacctgattggtgatttttccaaggtatgtgcgctgccaaccgtgtcagggaaacaccaagatctgaagtatgtcaacccagaaacagtggctgccttactgtcggggaagttccagggtctgattgagaagttttatgtcattgattgtcgctatccatatgagtatctgggaggacacatccagggagccttaaacttatatagtcaggaagaactgtttaacttctttctgaagaagcccatcgtccctttggacacccagaagagaataatcatcgtgttccactgtgaattctcctcagagaggggcccccgaatgtgccgctgtctgcgtgaagaggacaggtctctgaaccagtatcctgcattgtactacccagagctatatatccttaaaggcggctacagagacttctttccagaatatatggaactgtgtgaaccacagagctactgccctatgcatcatcaggaccacaagactgagttgctgaggtgtcgaagccagagcaaagtgcaggaaggggagcggcagctgcgggagcagattgcccttctggtgaaggacatgagcccatgataacattccagccactggctgctaacaagtcaccaaaaagacactgcagaaaccctgagcagaaagaggccttctggatggccaaacccaagattattaaaagatgtctctgcaaaccaacaggctaccaacttgtatccaggcctgggaatggattaggtttcagcagagctgaaagctggtggcagagtcctggagctggctctataaggcagccttgagttgcatagagatttgtattggttcagggaactctggcattccttttcccaactcctcatgtcttctcacaagccagccaactctttctctctgggcttcgggctatgcaagagcgttgtctaccttctttctttgtattttccttctttgtttccccctctttcttttttaaaaatggaaaaataaacactacagaatgag

SEQ ID NO: 155 - DNA, 1573 bp, Homo sapiens
  misc_feature: glutaminyl-peptide cyclotransferase (glutaminyl cyclase)
ggctgggagagatggcaggcggaagacaccggcgcgtcgtgggcaccctccacctgctgctgctggtggccgccctgccctgggcatccaggggggtcagtccgagtgcctcagcctggccagaggagaagaattaccaccagccagccattttgaattcatcggctcttcggcaaattgcagaaggcaccagtatctctgaaatgtggcaaaatgacttacagccattgctgatagagcgatacccgggatcccctggaagctatgctgctcgtcagcacatcatgcagcgaattcagaggcttcaggctgactgggtcttggaaatagacaccttcttgagtcagacaccctatgggtaccggtctttctcaaatatcatcagcaccctcaatcccactgctaaacgacatttggtcctcgcctgccactatgactccaagtatttttcccactggaacaacagagtgtttgtaggagccactgattcagccgtgccatgtgcaatgatgttggaacttgctcgtgccttagacaagaaactcctttccttaaagactgtttcagactccaagccagatttgtcactccagctgatcttctttgatggtgaagaggcttttcttcactggtctcctcaagattctctctatgggtctcgacacttagctgcaaagatggcatcgaccccgcacccacctggagcgagaggcaccagccaactgcatggcatggatttattggtcttattggatttgattggagctccaaacccaacgtttcccaatttttttccaaactcagccaggtggttcgaaagacttcaagcaattgaacatgaacttcatgaattgggtttgctcaaggatcactctttggaggggcggtatttccagaattacagttatggaggtgtgattcaggatgaccatattccatttttaagaagaggtgttccagttctgcatctgataccgtctcctttccctgaagtctggcacaccatggatgacaatgaagaaaatttggatgaatcaaccattgacaatctaaacaaaatcctacaagtctttgtgttggaatatcttcatttgtaatactctgatttagtttaggataattggttctagaattgaattcaaaagtcaaggcatcatttaaaataatctgatttcagacaaatgctgtgtggaaacatctatcctatagatcatcctattcttatgtgtctttggttatcagatcaattacagaataattgtgttgtgatattgtgtcctaaattgctcattaatttttatttacagattgaaaaagaggcaccgtgtaaagaaaatggcaaaataaatatctttccaaggatcatcatcacgatagctaaacagtacttaaatagcggttggaactaggtagcctttcgaattttatgattttttcatatgtggaaatctattacatgtaatacaaaacaaacatgtagtttgaaggcggtcagatttctttgagaaatctttgtagagttaattttatggaaattaaaatcagaattaaatgctaaaaaaaaaaaaaaaaa

SEQ ID NO: 156 - DNA, 6284 bp, Homo sapiens
  misc_feature: M-phase phosphoprotein 1
atcgcagtgctgctcgcgggtctggctagtcaggcgaagtttgcagaatggaatctaattttaatcaagagggagtacctcgaccatcttatgtttttagtgctgacccaattgcaaggccttcagaaataaatttcgatggcattaagcttgatctgtctcatgaattttccttagttgctccaaatactgaggcaaacagtttcgaatctaaagattatctccaggtttgtcttcgaataagaccatttacacagtcagaaaaagaacttgagtctgagggctgtgtgcatattctggattcacagactgttgtgctgaaagagcctcaatgcatccttggtcggttaagtgaaaaaagctcagggcagatggcacagaaattcagtttttccaaggtttttggcccagcaactacacagaaggaattctttcagggttgcattatgcaaccagtaaaagacctcttgaaaggacagagtcgtctgatttttacttacgggctaaccaattcaggaaaaacatatacatttcaagggacagaagaaaatattggcattctgcctcgaactttgaatgtattatttgatagtcttcaagaaagactgtatacaaagatgaaccttaaaccacatagatccagagaatacttaaggttatcatcagaacaagagaaagaagaaattgctagcaaaagtgcattgcttcggcaaattaaagaggttactgtgcataatgatagtgatgatactctttatggaagtttaactaactctttgaatatctcagagtttgaagaatccataaaagattatgaacaagccaacttgaatatggctaatagtataaaattttctgtgtgggtttctttctttgaaatttacaatgaatatatttatgacttatttgttcctgtatcatctaaattccaaaagagaaagatgctgcgcctttcccaagacgtaaagggctattcttttataaaagatctacaatggattcaagtatctgattccaaagaagcctatagacttttaaaactaggaataaagcaccagagtgttgccttcacaaaattgaataatgcttccagtagaagtcacagcatattcactgttaaaatattacagattgaagattctgaaatgtctcgtgtaattcgagtcagtgaattatctttatgtgatcttgctggttcagaacgaactatgaagacacagaatgaaggtgaaaggttaagagagactgggaatatcaacacttctttattgactctgggaaagtgtattaacgtcttgaagaatagtgaaaagtcaaagtttcaacagcatgtgcctttccgggaaagtaaactgactcactattttcaaagtttttttaatggtaaagggaaaatttgtatgattgtcaatatcagccaatgttatttagcctatgatgaaacactcaatgtattgaagttctccgccattgcacaaaaagtttgtgtcccagacactttaaattcctctcaagataaattatttggacctgtcaaatcttctcaagatgtatcactagacagtaattcaaacagtaaaatattaaatgtaaaaagagccaccatttcatgggaaaatagtctagaagatttgatggaagacgaggatttggttgaggagctagaaaacgctgaagaaactcaaaatgtggaaactaaacttcttgatgaagatctagataaaacattagaggaaaataaggctttcattagccacgaggagaaaagaaaactgttggacttaatagaagacttgaaaaaaaaactgataaatgaaaaaaaggaaaaattaaccttggaatttaaaattcgagaagaagttacacaggagtttactcagtattgggctcaacgggaagctgactttaaggagactctgcttcaagaacgagagatattagaagaaaatgctgaacgtcgtttggctatcttcaaggatttggttggtaaatgtgacactcgagaagaagcagcgaaagacatttgtgccacaaaagttgaaactgaagaagctactgcttgtttagaactaaagtttaatcaaattaaagctgaattagctaaaaccaaaggagaattaatcaaaaccaaagaagagttaaaaaagagagaaaatgaatcagattcattgattcaagagcttgagacatctaataagaaaataattacacagaatcaaagaattaaagaattgataaatataattgatcaaaaagaagatactatcaacgaatttcagaacctaaagtctcatatggaaaacacatttaaatgcaatgacaaggctgatacatcttctttaataataaacaataaattgatttgtaatgaaacagttgaagtacctaaggacagcaaatctaaaatctgttcagaaagaaaaagagtaaatgaaaatgaacttcagcaagatgaaccaccagcaaagaaagggtctatccatgttagttcagctatcactgaagaccaaaagaaaagtgaagaagtgcgaccgaacattgcagaaattgaagacatcagagttttacaagaaaataatgaaggactgagagcatttttactcactattgagaatgaacttaaaaatgaaaaggaagaaaaagcagaattaaataaacagattgttcattttcagcaggaactttctctttctgaaaaaaagaatttaactttaagtaaagaggtccaacaaattcagtcaaattatgatattgcaattgctgaattacatgtgcagaaaagtaaaaatcaagaacaggaggaaaagatcatgaaattgtcaaatgagatagaaactgctacaagaagcattacaaataatgtttcacaaataaaattaatgcacacgaaaatagacgaactacgtactcttgattcagtttctcagatttcaaacatagatttgctcaatctcagggatctgtcaaatggttctgaggaggataatttgccaaatacacagttagaccttttaggtaatgattatttggtaagtaagcaagttaaagaatatcgaattcaagaacccaatagggaaaattctttccactctagtattgaagctatttgggaagaatgtaaagagattgtgaaggcctcttccaaaaaaagtcatcagattgaggaactggaacaacaaattgaaaaattgcaggcagaagtaaaaggctataaggatgaaaacaatagactaaaggagaaggagcataaaaaccaagatgacctactaaaagaaaaagaaactcttatacagcagctgaaagaagaattgcaagaaaaaaatgttactcttgatgttcaaatacagcatgtagttgaaggaaagagagcgctttcagaacttacacaaggtgttacttgctataaggcaaaaataaaggaacttgaaacaattttagagactcagaaagttgaacgtagtcattcagccaagttagaacaagacattttggaaaaggaatctatcatcttaaagctagaaagaaatttgaaggaatttcaagaacatcttcaggattctgtcaaaaacaccaaagatttaaatgtaaaggaactcaagctgaaagaagaaatcacacagttaacaaataatttgcaagatatgaaacatttacttcaattaaaagaagaagaagaagaaaccaacaggcaagaaacagaaaaattgaaagaggaactctctgcaagctctgctcgtacccagaatctgaaagcagatcttcagaggaaggaagaagattatgctgacctgaaagagaaactgactgatgccaaaaagcagattaagcaagtacagaaagaggtatctgtaatgcgtgatgaggataaattactgaggattaaaattaatgaactggagaaaaagaaaaaccagtgttctcaggaattagatatgaagcagcgaaccattcagcaactcaaggagcagttaaataatcagaaagtggaagaagctatacaacagtatgagagagcatgcaaagatctaaatgttaaagagaaaataattgaagacatgcgaatgacactagaagaacaggaacaaactcaggtagaacaggatcaagtgcttgaggctaaattagaggaagttgaaaggctggccacagaattggaaaaatggaaggaaaaatgcaatgatttggaaaccaaaaacaatcaaaggtcaaataaagaacatgagaacaacacagatgtgcttggaaagctcactaatcttcaagatgagttacaggagtctgaacagaaatataatgctgatagaaagaaatggttagaagaaaaaatgatgcttatcactcaagcgaaagaagcagagaatatacgaaataaagagatgaaaaaatatgctgaggacagggagcgtttttttaagcaacagaatgaaatggaaatactgacagcccagctgacagagaaagatagtgaccttcaaaagtggcgagaagaacgagatcaactggttgcagctttagaaatacagctaaaagcactgatatccagtaatgtacagaaagataatgaaattgaacaactaaaaaggatcatatcagagacttctaaaatagaaacacaaatcatggatatcaagcccaaacgtattagttcagcagatcctgacaaacttcaaactgaacctctatcgacaagttttgaaatttccagaaataaaatagaggatggatctgtagtccttgactcttgtgaagtgtcaacagaaaatgatcaaagcactcgatttccaaaacctgagttagagattcaatttacacctttacagccaaacaaaatggcagtgaaacaccctggttgtaccacaccagtgacagttgagattcccaaggctcggaagaggaagagtaatgaaatggaggaggacttggtgaaatgtgaaaataagaagaatgctacacccagaactaatttgaaatttcctatttcagatgatagaaattcttctgtcaaaaaggaacaaaaggttgccatacgtccatcatctaagaaaacatattctttacggagtcaggcatccataattggtgtaaacctggccactaagaaaaaagaaggaacactacagaaatttggagacttcttacaacattctccctcaattcttcaatcaaaagcaaagaagataattgaaacaatgagctcttcaaagctctcaaatgtagaagcaagtaaagaaaatgtgtctcaaccaaaacgagccaaacggaaattatacacaagtgaaatttcatctcctattgatatatcaggccaagtgattttaatggaccagaaaatgaaggagagtgatcaccagattatcaaacgacgacttcgaacaaaaacagccaaataaatcacttatggaaatgtttaatataaattttatagtcatagtcattggaacttgcatcctgtattgtaaatataaatgtatatattatgcattaaatcactctgcatatagattgctgttttatacatagtataattttaattcaataaatgagtcaaaatttgtatatttttataaggcttttttataatagcttctttcaaactgtatttccctattatctcagacattggatcagtgaagatcctaggaaagaggctgttattctcatttattttgctatacaggatgtaataggtcaggtatttggtttacttatatttaacaatgtcttatgaattttttttactttatctgttatacaactgattttacatatctgtttggattatagctaggatttggagaataagtgtgtacagatcacaaaacatgtatatacattatttagaaaagatctcaagtctttaattagaatgtctcacttattttgtaaacattttgtgggtacatagtacatgtatatatttacggggtatgtgagatgttttgacacaggcatgcaatgtgaaatacgtgtatcatggagaatgaggtatccatcccctcaagcatttttcctttgaattacagataatccaattacattctttagatcatttaaaaatatacaagtaagttattattgattatagtcactctattgtgctatcagatagtagatcattctttttatcttatttgtttttgtacccattaaccatccccacctccccctgcaaccgtcagtacccttaccagccactggtaaccattcttctactctgtatgcccatgaggtcaattgattttatttttagatcccataaataaatgagaacatgcaaaaaaaaa

SEQ ID NO: 157 - DNA, 1292 bp, Homo sapiens
  misc_feature: ficolin (collagen/fibrinogen domain containing) 1
cagggagttgagaaactgtggcacaaggcgagagctggtttcctctgccctgttagagctgggggactcttcagagtcaaaggccagagagcatggagctgagtggagccaccatggcccgggggctcgctgtcctgctagtcttgttcctgcatatcaagaacctgcctgcccaggctgcggacacatgtccagaggtgaaggtggtgggcctggagggctctgacaagctcaccattctccgaggctgcccggggctgcccggggccccagggccaaagggagaggcaggtgtcattggagagagaggagaacgcggtctccctggagcccctggaaaggcaggaccagtggggcccaaaggagaccgaggagagaaggggatgcgtggagagaaaggagacgctgggcagtctcagtcgtgtgcgacaggcccacgcaactgcaaggacctgctagaccgggggtatttcctgagcggctggcacaccatctacctgcccgactgccggcccctgactgtgctctgtgacatggacacggacggagggggctggaccgttttccagcggaggatggatggctctgtggacttctatcgggactgggccgcatacaagcagggcttcggcagtcagctgggggagttctggctggggaacgacaacatccacgccctgactgcccagggaagcagcgagctccgtgtagacctggtggactttgagggcaaccaccagtttgctaagtacaaatcattcaaggtggctgacgaggcagagaagtacaagctggtactgggagcctttgtcgggggcagtgcgggtaattctctaacgggccacaacaacaacttcttctccaccaaagaccaagacaatgatgtgagttcttcgaattgtgctgagaagttccagggagcctggtggtacgccgactgtcatgcttcaaacctcaatggtctctacctcatgggaccccatgagagctatgccaatggtatcaactggagtgcggcgaaggggtacaaatatagctacaaggtgtcagagatgaaggtgcggcccgcctagacgggccaggacccctccacatgcacctgctagtggggaggccacacccacaagcgctgcgtcgtggaagtcaccccatttccccagccagacacactcccatgacgcccacagctgcccctttgcccccagctcagtcaagccgccacatgcccacaacctcaccagagggagaattatgtttctaaatatgtttactttgggacagaaaaaaaaaaa

SEQ ID NO: 158 - DNA, 2336 bp, Homo sapiens
  misc_feature: G-protein signalling modulator 2 (AGS3-like, C. elegans)
ggcacgaggaagaatcaggagcttaggatgtattaacaccaactcattaatatactaaccggacaatgttctacaaacaattctacattgtaaaggactggattggcacaaaataaaataattttattttattcagcttataatatgactcgatggaggaaaatttgataagcatgagagaagaccattcttttcatgttcgttacagaatggaagcttcttgcctagagctggccttggaaggggaacgtctatgtaaatcaggagactgccgcgctggcgtgtcattctttgaagctgcagttcaagttggaactgaagacctaaaaacacttagcgctatttacagccagttgggcaatgcttatttctatttgcatgattatgccaaagcattagaatatcaccatcatgatttaacccttgcaaggactattggagaccagctgggggaagcgaaagctagtggtaatctgggaaacaccttaaaagttcttgggaattttgacgaagccatagtttgttgtcagcgacacctagatatttccagagagcttaatgacaaggtgggagaagcaagagcactttacaatcttgggaatgtgtatcatgccaaagggaaaagttttggttgccctggtccccaggatgtaggagaatttccagaagaagtgagagatgctctgcaggcagccgtggatttttatgaggaaaacctatcattagtgactgctttgggtgaccgagcggcacaaggacgtgcctttggaaatcttggaaacacacattacctccttggcaacttcagggatgcagttatagctcatgagcagcgtctccttattgcaaaagaatttggagataaagcagctgaaagaagagcatatagcaaccttggaaatgcatatatatttcttggtgaatttgaaactgcctcggaatactacaagaagacactactgttggcccgacagcttaaagaccgagctgtagaagcacagtcttgttacagtcttggaaatacatatactttacttcaagactatgaaaaggccattgattatcatctgaagcacttagcaattgctcaagagctgaatgatagaattggtgaaggaagagcatgttggagcttaggaaatgcatacacagcactaggaaatcatgatcaagcaatgcattttgctgaaaagcacttggaaatttcaagagaggttggggataaaagtggtgaactaacagcacgacttaatctctcagaccttcaaatggttcttggtctgagctacagcacaaataactccataatgtctgaaaatactgaaattgatagcagtttgaatggtgtactccccaagttgggacgccggcatagtatggaaaatatggaacttatgaagttaacaccagaaaaggtacagaactggaacagtgaaattcttgctaagcaaaaacctcttattgccaaaccttctgcaaagctactctttgtcaacagactgaaggggaaaaaatacaaaacgaattcctccactaaagttctccaagatgccagtaattctattgaccaccgaattccaaattctcagaggaaaatcagtgcagatactattggagatgaagggttctttgacttattaagccgatttcaaagcaataggatggatgatcagagatgttgcttacaagaaaagaactgccatacagcttcaacaacaacttcttccactccccctaaaatgatgctaaaaacatcatctgttcctgtggtatcccccaacacggatgagtttttagatcttcttgccagctcacagagtcgccgtctggatgaccagagggctagtttcagtaatttgccagggcttcgtctaacacaaaacagccagtcggtacttagccacctgatgactaatgacaacaaagaggctgatgaagatttctttgacatccttgtaaaatgtcaaggatccagattagatgatcaaagatgtgctccaccacctgctaccacaaagggtccgacagtaccagatgaagactttttcagccttattttacggtcccagggaaagagaatggatgaacagagagttcttttacaaagagatcaaaacagagacactgactttgggctaaaggactttttgcaaaataatgctttgttggagtttaaaaattcagggaaaaaatcggcagaccattagttactatggatttattttttttcctttcaaacacggtaaggaaacaatctattacttttttccttaaaaggagaatttatagcactgtaatacagcttaaaatatttttagaatgatgtaaatagttaa

SEQ ID NO: 159 - DNA, 1364 bp, Homo sapiens
  misc_feature: spleen focus forming virus (SFFV) proviral integration oncogene spi1
aaaatcaggaacttgtgctggccctgcaatgtcaagggagggggctcacccagggctcctgtagctcagggggcaggcctgagccctgcacccgccccacgaccgtccagcccctgacgggcaccccatcctgaggggctctgcattggcccccaccgaggcaggggatctgaccgactcggagcccggctggatgttacaggcgtgcaaaatggaagggtttcccctcgtcccccctccatcagaagacctggtgccctatgacacggatctataccaacgccaaacgcacgagtattacccctatctcagcagtgatggggagagccatagcgaccattactgggacttccacccccaccacgtgcacagcgagttcgagagcttcgccgagaacaacttcacggagctccagagcgtgcagcccccgcagctgcagcagctctaccgccacatggagctggagcagatgcacgtcctcgatacccccatggtgccaccccatcccagtcttggccaccaggtctcctacctgccccggatgtgcctccagtacccatccctgtccccagcccagcccagctcagatgaggaggagggcgagcggcagagccccccactggaggtgtctgacggcgaggcggatggcctggagcccgggcctgggctcctgcctggggagacaggcagcaagaagaagatccgcctgtaccagttcctgttggacctgctccgcagcggcgacatgaaggacagcatctggtgggtggacaaggacaagggcaccttccagttctcgtccaagcacaaggaggcgctggcgcaccgctggggcatccagaagggcaaccgcaagaagatgacctaccagaagatggcgcgcgcgctgcgcaactacggcaagacgggcgaggtcaagaaggtgaagaagaagctcacctaccagttcagcggcgaagtgctgggccgcgggggcctggccgagcggcgccacccgccccactgagcccgcagcccccgccggccccgccaggcctccccgctggccatagcattaagccctcgcccggcccggacacagggaggacgctcccggggcccagaggcaggactgtggcgggccgggctccgtcacccgcccctccccccactccaggccccctccacatcccgcttcgcctccctccaggactccaccccggctcccgacgccagctgggcgtcagacccaccggcaaccttgcagaggacgacccggggtactgccttgggagtctcaagtccgtatgtaaatcagatctcccctctcacccctcccacccattaacctcctcccaaaaaacaagtaaagttattctcaatcc

SEQ ID NO: 160 - DNA, 2530 bp, Homo sapiens
cagcttccctgtggtttcccgaggcttccttgcttcccgctctgcgaggagcctttcatccgaaggcgggacgatgccggataatcggcagccgaggaaccggcagccgaggatccgctccgggaacgagcctcgttccgcgcccgccatggaaccggatggtcgcggtgcctgggcccacagtcgcgccgcgctcgaccgcctggagaagctgctgcgctgctcgcgttgtactaacattctgagagagcctgtgtgtttaggaggatgtgagcacatcttctgtagtaattgtgtaagtgactgcattggaactggatgtccagtgtgttacaccccggcctggatacaagacttgaagataaatagacaactggacagcatgattcaactttgtagtaagcttcgaaatttgctacatgacaatgagctgtcagatttgaaagaagataaacctaggaaaagtttgtttaatgatgcaggaaacaagaagaattcaattaaaatgtggtttagccctcgaagtaagaaagtcagatatgttgtgagtaaagcttcagtgcaaacccagcctgcaataaaaaaagatgcaagtgctcagcaagactcatatgaatttgtttccccaagtcctcctgcagatgtttctgagagggctaaaaaggcttctgcaagatctggaaaaaagcaaaaaaagaaaactttagctgaaatcaaccaaaaatggaatttagaggcagaaaaagaagatggtgaatttgactccaaagaggaatctaagcaaaagctggtatccttctgtagccaaccatctgttatctccagtcctcagataaatggtgaaatagacttactagcaagtggctccttgacagaatctgaatgttttggaagtttaactgaagtctctttaccattggctgagcaaatagagtctccagacactaagagcaggaatgaagtagtgactcctgagaaggtctgcaaaaattatcttacatctaagaaatctttgccattagaaaataatggaaaacgtggccatcacaatagactttccagtcccatttctaagagatgtagaaccagcattctgagcaccagtggagattttgttaagcaaaccgtgccctcagaaaatataccattgcctgaatgttcttcaccaccttcatgcaaacgtaaagttggtggtacatcagggaggaaaaacagtaacatgtccgatgaattcattagtctttcaccaggtacaccaccttctacattaagtagttcaagttacaggcaagtgatgtctagtccctcagcaatgaagctgttgcccaatatggctgtgaaaagaaatcatagaggagagactttgctccatattgcttctattaagggcgacataccttctgttgaataccttttacaaaatggaagtgatccaaatgttaaagaccatgctggatggacaccattgcatgaagcttgcaatcatgggcacctgaaggtagtggaattattgctccagcataaggcattggtgaacaccaccgggtatcaaaatgactcaccacttcacgatgcagccaagaatgggcacgtggatatagtcaagctgttactttcctatggagcctccagaaatgctgttaatatatttggtctgcggcctgtcgattatacagatgatgaaagtatgaaatcgctattgctgctaccagagaagaatgaatcatcctcagctagccactgctcagtaatgaacactgggcagcgtagggatggacctcttgtacttataggcagtgggctgtcttcagaacaacagaaaatgctcagtgagcttgcagtaattcttaaggctaaaaaatatactgagtttgacagtacagtaactcatgttgttgttcctggtgatgcagttcaaagtaccttgaagtgtatgcttgggattctcaatggatgctggattctaaaatttgaatgggtaaaagcatgtctacgaagaaaagtatgtgaacaggaagaaaagtatgaaattcctgaaggtccacgcagaagcaggctcaacagagaacagctgttgccaaagctgtttgatggatgctacttctatttgtggggaaccttcaaacaccatccaaaggacaaccttattaagctcgtcactgcaggtgggggccagatcctcagtagaaagcccaagccagacagtgacgtgactcagaccatcaatacagtcgcataccatgcgagacccgattctgatcagcgcttctgcacacagtatatcatctatgaagatttgtgtaattatcacccagagagggttcggcagggcaaagtctggaaggctccttcgagctggtttatagactgtgtgatgtcctttgagttgcttcctcttgacagctgaatattataccagatgaacatttcaaattgaatttgcacggtttgtgagagcccagtcattgtactgtttttaatgttcacatttttacaaataggtagagtcattcatatttgtctttgaatc

SEQ ID NO: 161 - DNA, 1024 bp, Homo sapiens
  misc_feature: guanidinoacetate N-methyltransferase
gggcggcgcgcgatcgaggtcgggtcgccgtccagcctgcagcatgagcgcccccagcgcgacccccatcttcgcgcccggcgagaactgcagccccgcgtggggggcggcgcccgcggcctacgacgcagcggacacgcacctgcgcatcctgggcaagccggtgatggagcgctgggagaccccctatatgcacgcgctggccgccgccgcctcctccaaagggggccgggtcctggaggtgggctttggcatggccatcgcagcgtcaaaggtgcaggaggcgcccattgatgagcattggatcatcgagtgcaatgacggcgtcttccagcggctccgggactgggccccacggcagacacacaaggtcatccccttgaaaggcctgtgggaggatgtggcacccaccctgcctgacggtcactttgatgggatcctgtacgacacgtacccactctcggaggagacctggcacacacaccagttcaacttcatcaagaaccacgcctttcgcctgctgaagccggggggcgtcctcacctactgcaacctcacctcctggggggagctgatgaagtccaagtactcagacatcaccatcatgtttgaggagacgcaggtgcccgcgctgctggaggccggcttccggagggagaacatccgtacggaggtgatggcgctggtcccaccggccgactgccgctactacgccttcccacagatgatcacgcccctggtgaccaaaggctgagcccccaccccggcccggccacacccatgccctcctccgtgccttcctggccgggagtccagggtgtcgcaccagccctgggctgatcccagctgtgtgtcaccagaagctttcccggcttctctgtgaggggtcccaccagcccagggctgatcccagctgtgtgtcaccagcagctttcccagcttctctgtgagggtcactgctgcccactgcagggtccctgaggtgaagtaaacgccggcgctgcgcttggccagtcggcagtga

SEQ ID NO: 162 - DNA, 1821 bp, Homo sapiens
  misc_feature: CHK1 checkpoint homolog (S. pombe)
ggccggacagtccgccgaggtgctcggtggagtcatggcagtgccctttgtggaagactgggacttggtgcaaaccctgggagaaggtgcctatggagaagttcaacttgctgtgaatagagtaactgaagaagcagtcgcagtgaagattgtagatatgaagcgtgccgtagactgtccagaaaatattaagaaagagatctgtatcaataaaatgctaaatcatgaaaatgtagtaaaattctatggtcacaggagagaaggcaatatccaatatttatttctggagtactgtagtggaggagagctttttgacagaatagagccagacataggcatgcctgaaccagatgctcagagattcttccatcaactcatggcaggggtggtttatctgcatggtattggaataactcacagggatattaaaccagaaaatcttctgttggatgaaagggataacctcaaaatctcagactttggcttggcaacagtatttcggtataataatcgtgagcgtttgttgaacaagatgtgtggtactttaccatatgttgctccagaacttctgaagagaagagaatttcatgcagaaccagttgatgtttggtcctgtggaatagtacttactgcaatgctcgctggagaattgccatgggaccaacccagtgacagctgtcaggagtattctgactggaaagaaaaaaaaacatacctcaacccttggaaaaaaatcgattctgctcctctagctctgctgcataaaatcttagttgagaatccatcagcaagaattaccattccagacatcaaaaaagatagatggtacaacaaacccctcaagaaaggggcaaaaaggccccgagtcacttcaggtggtgtgtcagagtctcccagtggattttctaagcacattcaatccaatttggacttctctccagtaaacagtgcttctagtgaagaaaatgtgaagtactccagttctcagccagaaccccgcacaggtctttccttatgggataccagcccctcatacattgataaattggtacaagggatcagcttttcccagcccacatgtcctgatcatatgcttttgaatagtcagttacttggcaccccaggatcctcacagaacccctggcagcggttggtcaaaagaatgacacgattctttaccaaattggatgcagacaaatcttatcaatgcctgaaagagacttgtgagaagttgggctatcaatggaagaaaagttgtatgaatcaggttactatatcaacaactgataggagaaacaataaactcattttcaaagtgaatttgttagaaatggatgataaaatattggttgacttccggctttctaagggtgatggattggagttcaagagacacttcctgaagattaaagggaagctgattgatattgtgagcagccagaaggtttggcttcctgccacatgatcggaccatcggctctggggaatcctggtgaatatagtgctgctatgttgacattattcttcctagagaagattatcctgtcctgcaaactgcaaatagtagttcctgaagtgttcacttccctgtttatccaaacatcttccaatttattttgtttgttcggcatacaaataatacctatatcttaattgtaagcaaaactttggggaaaggatgaatagaattcatttgattatttcttcatgtgtgtttagtatctgaatttgaaactcatctggtggaaaccaagtttcaggggacatgagttttccagcttttatacacacgtatctcatttttatcaaaacattttgttt

SEQ ID NO: 163 - DNA, 1286 bp, Homo sapiens
  misc_feature: interleukin 1 receptor, type II
gccacgtgctgctgggtctcagtcctccacttcccgtgtcctctggaagttgtcaggagcaatgttgcgcttgtacgtgttggtaatgggagtttctgccttcacccttcagcctgcggcacacacaggggctgccagaagctgccggtttcgtgggaggcattacaagcgggagttcaggctggaaggggagcctgtagccctgaggtgcccccaggtgccctactggttgtgggcctctgtcagcccccgcatcaacctgacatggcataaaaatgactctgctaggacggtcccaggagaagaagagacacggatgtgggcccaggacggtgctctgtggcttctgccagccttgcaggaggactctggcacctacgtctgcactactagaaatgcttcttactgtgacaaaatgtccattgagctcagagtttttgagaatacagatgctttcctgccgttcatctcatacccgcaaattttaaccttgtcaacctctggggtattagtatgccctgacctgagtgaattcacccgtgacaaaactgacgtgaagattcaatggtacaaggattctcttcttttggataaagacaatgagaaatttctaagtgtgagggggaccactcacttactcgtacacgatgtggccctggaagatgctggctattaccgctgtgtcctgacatttgcccatgaaggccagcaatacaacatcactaggagtattgagctacgcatcaagaaaaaaaaagaagagaccattcctgtgatcatttcccccctcaagaccatatcagcttctctggggtcaagactgacaatcccgtgtaaggtgtttctgggaaccggcacacccttaaccaccatgctgtggtggacggccaatgacacccacatagagagcgcctacccgggaggccgcgtgaccgaggggccacgccaggaatattcagaaaataatgagaactacattgaagtgccattgatttttgatcctgtcacaagagaggatttgcacatggattttaaatgtgttgtccataataccctgagttttcagacactacgcaccacagtcaaggaagcctcctccacgttctcctggggcattgtgctggccccactttcactggccttcttggttttggggggaatatggatgcacagacggtgcaaacacagaactggaaaagcagatggtctgactgtgctatggcctcatcatcaagactttcaatcctatcccaagtgaaataaatggaatgaaataattcaaacac

SEQ ID NO: 164 - DNA, 1085 bp, Homo sapiens
  misc_feature: transgelin
atcctgtctgtccgaacccagacacaagtcttcactccttcctgcgagccctgaggaagccttctttccccagacatggccaacaagggtccttcctatggcatgagccgcgaagtgcagtccaaaatcgagaagaagtatgacgaggagctggaggagcggctggtggagtggatcatagtgcagtgtggccctgatgtgggccgcccagaccgtgggcccttgggcttccaggtgtggctgaagaatggcgtgattctgagcaagctggtgaacagcctgtaccctgatggctccaagccggtgaaggtgcccgagaacccaccctccatggtcttcaagcagatggagcaggtggctcagttcctgaaggcggctgaggactctggggtcatcaagactgacatgttccagactgttgacctctttgaaggcaaagacatggcagcagtgcagaggaccctgatggctttgggcagcttggcagtgaccaagaatgatgggcactaccgtggagatcccaactggtttatgaagaaagcgcaggagcataagagggaattcacagagagccagctgcaggagggaaagcatgtcattggccttcagatgggcagcaacagaggggcctcccaggccggcatgacaggctacggacgacctcggcagatcatcagttagagcggagagggctagccctgagcccggcgctcccccagctccttggctgcagccatcccgcttagcctgcctcacccacacccgtgtggtaccttcagccctggccaagctttgaggctctgtcactgagcaatggtaactgcacctgggcagctcctccctgtgcccccagcctcagcccaacttcttacccgaaagcatcactgccttggcccctccctcccggcggcccccatcacctctactgtctcctccctgggctaagcaggggagaagcgggctgggggtagcctggatgtgggcgaagtccactgtcctccttggcggcaaaagcccattgaagaagaaccagcccagcctgccccctatcttgtacctggaatatttttggggttggaactctc

SEQ ID NO: 165 - DNA, 2414 bp, Homo sapiens
  misc_feature: gamma-glutamyltransferase-like activity 1
ggggtgagggcagcagctcgccacagctgccagccatctgtccattcacccatctgtccatctggcagcccgctgttcagacctgtctgtctgtccgcccatctctgtaagcccatctctgtcccattgtctatctgaccatctttctcttactgtcctctttgtctagctatctggcctatctgtcgatccatcttcgtgtctgtcttcagcccccacctgtttttgtccatctgtccaattacctgtgactctgtgcatcttcttgtccattcatctgcccacccatccgtccctccgtctgcccaccagccgcccctctcctcctgggctgcagagccatggcccggggctacggggccacggtcagcctagtcctgctgggtctggggctggcgctggctgtcattgtgctggctgtggtcctctctcgacaccaggccccatgtggcccccaggcctttgcccacgctgctgttgccgccgactccaaggtctgctcggatattggacgagccatcctccagcagcagggctcacccgtggatgccaccatcgcggctctggtctgcaccagcgtcgtcaaccctcagagcatgggcctgggcggaggggtcatcttcaccatctacaatgtgacaacagggaaggtggaggtcatcaatgcccgggagacggtgccggccagccacgccccgagcctgctggaccagtgtgcacaggctctgccactgggcacaggggcccagtggatcggggtgcccggggagctccgtggctatgccgaggcccaccgccgccatggccgcctgccctgggcgcagctgttccagcccaccatcgcgctgctccgaggggggcatgtggtggcccctgtcctcagccgtttcctgcacaacagcatcctgcggccttccttgcaggcgtcaaccctgcgccagctcttcttcaacgggacagaacccctgaggcctcaggacccactcccatggcctgcactggccaccaccctggagaccgtggccacagagggcgtggaggtcttctacacggggaggctgggccagatgctggtggaggacattgccaaggaagggagccagctgacgctgcaggacctggccaagttccagcccgaggtggtggatgccctggaggtgcccctgggggactataccctgtactcaccaccgccgcctgcagggggtgccattctcagctttatcctcaacgtgctaagagggttcaacttctcaacagagtctatggccaggcctgaagggagggtgaacgtgtaccaccaccttgtagagacgctcaagtttgccagggggcagaggtggaggctgggggaccctcgaagccacccgaagctccagaatgcctcccgggacctgctgggggagaccctggcccagctcatccgccaacagatcgatggccggggggaccaccagctcagccactacagcttggccgaggcctggggccacgggacaggcacgtcccatgtgtctgtgctgggggaggatggcagcgccgtggctgccaccagcaccatcaacacaccctttggagcgatggtgtattcaccacggacaggcatcatcctcaacaacgagctcctggacttatgcgagcgatgcccctggggttccggcaccaccccctcacctgtgagtggagacagggtgggtggagctcccggaaggtgctggcccccagttccaggcgagcgttccccatcctccatggtgccctccatcttgatcaacaaagcccaggggtcgaagctagtgattggcggggctggcggggagctcatcatctctgctgtggcccaggccatcatgagcaagctgtggcttggctttgacctgagagcggccattgcagcccccatcctgcatgtcaacagcaagggctgtgtggagtacgagcccaacttcagccaggaggtgcagaggggactccaagaccgtggccagaaccagacccagaggcccttcttcctgaacgtggtccaggctgtgtcccaggagggggcctgtgtgtacgccgtctcggacctgaggaagagtggggaggccgcaggctactaagacactgctctgcccagagctgaagtctggccccaccatgagtcctgtgtccaggccggacatggctgggggaccaactactctggcaggatctggacccctggcaggggagtccagctgagagtggaagaggtggcggggaccagctgggcagatgagaggctgagcctcatccctaaccccctttcccagagcccctggtggtcctgaaccggcccctctatccctccgcaggcctcttacctggggccactctcccaccctctcgatctgtatatcctccagtccaagattaaagaagaggcggactgt

SEQ ID NO: 166 - DNA, 2306 bp, Homo sapiens
  misc_feature: primase, polypeptide 2A, 58kDa
ggtttcatatgaactctcccgccacccgggaacagctggctgccaccgtttgtgttttccgagtttgtattcttgcaggtgaccaagatggagttttctggaagaaagcggaggaagctgaggttggcaggtgaccagaggaatgcttcctaccctcattgccttcagttttacttgcagccaccttctgaaaacatatctttaacagaatttgaaaacttggctattgatagagttaaattgttaaaatcagttgaaaatcttggagtgagctatgtgaaaggaactgaacaataccagagtaagttggagagtgagcttcggaagctcaagttttcctacagagagaagctagaagatgaatatgaaccacgaagaagagatcatatttctcattttattttgcggcttgcttattgccagtctgaagaacttagacgctggttcattcaacaagaaatggatctccttcgatttagatttagtattttacccaaggataaaattcaggatttcttaaaggatagccaattgcagtttgaggctataagtgatgaagagaagactcttcgagaacaggagattgttgcctcatcaccaagtttaagtggacttaagttggggttcgagtccatttataagatcccttttgctgatgctctggatttgtttcgaggaaggaaagtctatttggaagatggctttgcttacgtaccacttaaggacattgtggcaatcatcctgaatgaatttagagccaaactgtccaaggctttggcattaacagccaggtccttgcctgctgtgcagtctgatgaaagacttcagcctctgctcaatcacctcagtcattcctacactggccaagattacagtacccagggaaatgttgggaagatttctttagatcagattgatttgctttctaccaaatccttcccaccttgcatgcgtcagttacataaagccttgcgggaaaatcaccatcttcgtcatggaggccgaatgcagtatggcctatttctgaagggcattggtttaactttggaacaggcattgcagttctggaagcaagaatttatcaaaggaaagatggatccagacaagtttgataaaggttactcttacaacatccgtcacagctttggaaaggaaggcaagaggacagactatacacctttcagttgcctgaagattattctgtccaatccaccaagccaaggggattatcatgggtgcccattccgtcacagtgatccagagctgctgaagcaaaagttgcagtcatacaagatctctcctggagggataagccagattttggatttagtaaaggggacacattaccaggtagcctgtcaaaaatactttgagatgatacacaatgtggatgattgtggcttttctttgaatcatcctaatcagttcttttgtgagagccaacgtattctaaatggtggtaaagacataaagaaggaacctatccaaccagaaactcctcaacccaaaccaagtgtccagaaaaccaaggatgcatcatctgctctggcctctttaaattcctctctggaaatggatatggaaggactagaagattactttagtgaagattcttaggcagttttataaccctttttcctcaatagcctgtttcctgtttttaagattttgcctttgttgttgaaaaagggtttcactgtcaccaaggcttagtgcagtgacacaattacagctgattgcagccttgaccttcccagctcaagtgatcctcctacctcagcctcccaagtagttaggacacacaggtgtgcacctcatatccagataatttttttcaatttttttttgtagaggtggggggtctccctatgttgcccaggcagatctcagactcctgggctcaagcgatcctcacacctcagcgtcccagagtgctgggattacagttgtgagccactgtgcctggcctttttttttttttaaccttttcgtttaacttctctcttcactgcatcccaatccatctacaggcatgcacacttattaggaaaggaggtttgaggtaacaacagagactttcactatattttgctttgacagaaggaaagaggaggagtttctattaaaatctgtcacttgagtgatgtcatttaagtcctattttaggagataaaaacagctttggggactggttaaagtcccccagaaactacaataaagaacaacttttgttttaactcttaatcactttgtaattttgactcaatccttttctggaccatttttgttaataaatatcaaagtgt

SEQ ID NO: 167 - DNA, 2254 bp, Homo sapiens
  misc_feature: acyloxyacyl hydrolase (neutrophil)
aaagaaccgcacaccacagactccctccagctctttgtgtgtggctctctcagggtccaacaagagcaagctgtgggtctgtgagtgtttatgtgtgcttttattcacttcacacttattgaaaagtgtgtatgtgagagggtggggtgtgtgtgtcaaagagagtgaggaagagaaggagagagagatcaattgattctgcagcctcagctccagcatccctcagttgggagcttccaaagccgggtgatcacttggggtgcatagctcggagatgcagtccccctggaaaatccttacggtggcgcctctattcttgctcctgtctcttcagtcctcggcctctccagccaacgatgaccagtccaggcccagcctctcgaatgggcacacctgtgtagggtgtgtgctggtggtgtctgtaatagaacagcttgctcaagttcacaactcgacggtccaggcctcgatggagagactgtgcagctacctgcctgaaaaactgttcttgaaaaccacctgctatttagtcattgacaagtttggatcagacatcataaaactgcttagcgcagatatgaatgctgatgtggtatgtcacactctggagttttgtaaacagaacactggccaaccattgtgtcatctctaccctcttcccaaggagacatggaaatttacactacagaaggcaagacaaattgtcaagaagtccccgattctgaaatattctagaagtggttctgacatttgttcactcccggttttggccaagatctgccagaaaattaaattagctatggaacagtctgtgccattcaaagatgtggattcagacaaatacagcgttttcccaacactgcggggctatcactggcgggggagagactgtaatgacagcgacgagtcagtgtacccaggtagaaggccgaacaactgggatgtccatcaggattcaaactgtaatggcatttggggtgtcgatccaaaagatggagttccatatgagaagaaattctgtgaaggttcacagcccaggggaatcattttgctgggagactcagctggggctcattttcacatctctcctgaatggatcacagcgtcgcagatgtctttgaactctttcatcaatctaccaacagcccttaccaacgagcttgactggccccaactctctggtgctacaggatttctggactccactgttggaattaaagaaaaatctatttaccttcgcttatggaaaagaaaccactgtaatcacagggactaccagaatatttcaagaaatggtgcatcttcccgaaacctgaagaaatttatagaaagcttgtctagaaacaaggtgttggactatcccgccatcgttatatatgccatgattggaaatgatgtctgcagtgggaagagtgacccagtcccagccatgaccactcctgagaaactctactccaacgtcatgcagactctgaagcatctaaattcccacctgcccaatggcagccatgttattttgtatggcttaccagatggaacctttctctgggataatttgcacaacagatatcatcctctcggccagctaaataaagacatgacctatgcgcagttgtactccttcctgaactgcctccaggtcagcccctgccacggctggatgtcttccaacaagacgttgcggactctcacttcagagagagcagagcaactctccaacacactgaaaaaaattgcagccagtgagaaatttacaaacttcaatcttttctacatggattttgccttccatgaaatcatacaggagtggcagaagagaggcggacagccctggcagctcatcgagcccgtggatggattccaccccaacgaggtggctttgctgttgttggcggatcatttctggaaaaaggtgcagctccagtggccccaaatcctgggaaaggagaatccgttcaacccccagattaaacaggtgtttggagaccaaggcgggcactgagcctctcaggagcatgcacccctggggagcacagggaggcagaggcttgggtaaactcattccacaaaccctatgggggctgccacgtcacaggcccaaaggactcttcttcagcagcatctttgcaaaatgtctttctctcaatgaagagcatatctggacgactgtgcaatgctgtgtgctcccggggatcagtaacccttccgctgttcctgaaataacctttcataaagtgctttgggtgccattcca

SEQ ID NO: 168 - DNA, 1424 bp, Homo sapiens
  misc_feature: CD86 antigen (CD28 antigen ligand 2, B7-2 antigen)
aggagccttaggaggtacggggagctcgcaaatactccttttggtttattcttaccaccttgcttctgtgttccttgggaatgctgctgtgcttatgcatctggtctctttttggagctacagtggacaggcatttgtgacagcactatgggactgagtaacattctctttgtgatggccttcctgctctctggtgctgctcctctgaagattcaagcttatttcaatgagactgcagacctgccatgccaatttgcaaactctcaaaaccaaagcctgagtgagctagtagtattttggcaggaccaggaaaacttggttctgaatgaggtatacttaggcaaagagaaatttgacagtgttcattccaagtatatgggccgcacaagttttgattcggacagttggaccctgagacttcacaatcttcagatcaaggacaagggcttgtatcaatgtatcatccatcacaaaaagcccacaggaatgattcgcatccaccagatgaattctgaactgtcagtgcttgctaacttcagtcaacctgaaatagtaccaatttctaatataacagaaaatgtgtacataaatttgacctgctcatctatacacggttacccagaacctaagaagatgagtgttttgctaagaaccaagaattcaactatcgagtatgatggtattatgcagaaatctcaagataatgtcacagaactgtacgacgtttccatcagcttgtctgtttcattccctgatgttacgagcaatatgaccatcttctgtattctggaaactgacaagacgcggcttttatcttcacctttctctatagagcttgaggaccctcagcctcccccagaccacattccttggattacagctgtacttccaacagttattatatgtgtgatggttttctgtctaattctatggaaatggaagaagaagaagcggcctcgcaactcttataaatgtggaaccaacacaatggagagggaagagagtgaacagaccaagaaaagagaaaaaatccatatacctgaaagatctgatgaagcccagcgtgtttttaaaagttcgaagacatcttcatgcgacaaaagtgatacatgtttttaattaaagagtaaagcccatacaagtattcattttttctaccctttcctttgtaagttcctgggcaacctttttgatttcttccagaaggcaaaaagacattaccatgagtaataagggggctccaggactccctctaagtggaatagcctccctgtaactccagctctgctccgtatgccaagaggagactttaattctcttactgcttcttttcacttcagagcacacttatgggccaagcccagcttaatggctcatgacctggaaataaaatttaggaccaataaaaaaaaaaaaaaaaaaaa

SEQ ID NO: 169 - DNA, 2798 bp, Homo sapiens
  misc_feature: integrin, beta 7
cgttgctgtcgctctgcacgcacctatgtggaaactaaagcccagagagaaagtctgacttgccccacagccagtgagtgactgcagcagcaccagaatctggtctgtttcctgtttggctcttctaccactacggcttgggatctcgggcatggtggctttgccaatggtccttgttttgctgctggtcctgagcagaggtgagagtgaattggacgccaagatcccatccacaggggatgccacagaatggcggaatcctcacctgtccatgctggggtcctgccagccagccccctcctgccagaagtgcatcctctcacaccccagctgtgcatggtgcaagcaactgaacttcaccgcgtcgggagaggcggaggcgcggcgctgcgcccgacgagaggagctgctggctcgaggctgcccgctggaggagctggaggagccccgcggccagcaggaggtgctgcaggaccagccgctcagccagggcgcccgcggagagggtgccacccagctggcgccgcagcgggtccgggtcacgctgcggcctggggagccccagcagctccaggtccgcttccttcgtgctgagggatacccggtggacctgtactaccttatggacctgagctactccatgaaggacgacctggaacgcgtgcgccagctcgggcacgctctgctggtccggctgcaggaagtcacccattctgtgcgcattggttttggttcctttgtggacaaaacggtgctgccctttgtgagcacagtaccctccaaactgcgccacccctgccccacccggctggagcgctgccagtcaccattcagctttcaccatgtgctgtccctgacgggggacgcacaagccttcgagcgggaggtggggcgccagagtgtgtccggcaatctggactcgcctgaaggtggcttcgatgccattctgcaggctgcactctgccaggagcagattggctggagaaatgtgtcccggctgctggtgttcacttcagacgacacattccatacagctggggacgggaagttgggcggcattttcatgcccagtgatgggcactgccacttggacagcaatggcctctacagtcgcagcacagagtttgactacccttctgtgggtcaggtagcccaggccctctctgcagcaaatatccagcccatctttgctgtcaccagtgccgcactgcctgtctaccaggagctgagtaaactgattcctaagtctgcagttggggagctgagtgaggactccagcaacgtggtacagctcatcatggatgcttataatagcctgtcttccaccgtgacccttgaacactcttcactccctcctggggtccacatttcttacgaatcccagtgtgagggtcctgagaagagggagggtaaggctgaggatcgaggacagtgcaaccacgtccgaatcaaccagacggtgactttctgggtttctctccaagccacccactgcctcccagagccccatctcctgaggctccgggcccttggcttctcagaggagctgattgtggagttgcacacgctgtgtgactgtaattgcagtgacacccagccccaggctccccactgcagtgatggccagggacacctacaatgtggtgtatgcagctgtgcccctggccgcctaggtcggctctgtgagtgctctgtggcagagctgtcctccccagacctggaatctgggtgccgggctcccaatggcacagggcccctgtgcagtggaaagggtcactgtcaatgtggacgctgcagctgcagtggacagagctctgggcatctgtgcgagtgtgacgatgccagctgtgagcgacatgagggcatcctctgcggaggctttggtcgctgccaatgtggagtatgtcactgtcatgccaaccgcacgggcagagcatgcgaatgcagtggggacatggacagttgcatcagtcccgagggagggctctgcagtgggcatggacgctgcaaatgcaaccgctgccagtgcttggacggctactatggtgctctatgcgaccaatgcccaggctgcaagacaccatgcgagagacaccgggactgtgcagagtgtggggccttcaggactggcccactggccaccaactgcagtacagcttgtgcccataccaatgtgaccctggccttggcccctatcttggatgatggctggtgcaaagagcggaccctggacaaccagctgttcttcttcttggtggaggatgacgccagaggcacggtcgtgctcagagtgagaccccaagaaaagggagcagaccacacgcaggccattgtgctgggctgcgtagggggcatcgtggcagtggggctggggctggtcctggcttaccggctctcggtggaaatctatgaccgccgggaatacagtcgctttgagaaggagcagcaacaactcaactggaagcaggacagtaatcctctctacaaaagtgccatcacgaccaccatcaatcctcgctttcaagaggcagacagtcccactctctgaaggagggagggacacttacccaaggctcttctccttggaggacagtgggaactggagggtgagaggaagggtgggtctgtaagaccttggtaggggactaattcactggcgaggtgcggccaccaccctacttcattttcagagtgacacccaagagggctgcttcccatgcctgcaaccttgcatccatctgggctaccccacccaagtatacaataaagtcttacctcagaaaaaaaaaaaaaaaaaa

SEQ ID NO: 170 - DNA, 8665 bp, Homo sapiens
  misc_feature: telomerase-associated protein 1
  misc_feature (8261)..(8261): n is a, c, g, or t
ggtaccggtccggaattcccgggtcgacccacgcgtccggaatcggacgccccaggcatatacaagctgagtttcagccatggaaaaactccatgggcatgtgtctgcccatccagacatcctctccttggagaaccggtgcctggctatgctccctgacttacagcccttggagaaactacatcagcatgtatctacccactcagatatcctctccttgaagaaccagtgcctagccacgcttcctgacctgaagaccatggaaaaaccacatggatatgtgtctgcccacccagacatcctctccttggagaaccagtgcctggccacactttctgacctgaagaccatggagaaaccacatggacatgtttctgcccacccagacatcctctccttggagaaccggtgcctggccaccctccctagtctaaagagcactgtgtctgccagccccttgttccagagtctacagatatctcacatgacgcaagctgatttgtaccgtgtgaacaacagcaattgcctgctctctgagcctccaagttggagggctcagcatttctctaagggactagacctttcaacctgccctatagccctgaaatccatctctgccacagagacagctcaggaagcaactttgggtcgttggtttgattcagaagagaagaaaggggcagagacccaaatgccttcttatagtctgagcttgggagaggaggaggaggtggaggatctggccgtgaagctcacctctggagactctgaatctcatccagagcctactgaccatgtccttcaggaaaagaagatggctctactgagcttgctgtgctctactctggtctcagaagtaaacatgaacaatacatctgaccccaccctggctgccatttttgaaatctgtcgtgaacttgccctcctggagcctgagtttatcctcaaggcatctttgtatgccaggcagcagctgaacgtccggaatgtggccaataacatcttggccattgctgctttcttgccggcgtgtcgcccccacctgcgacgatatttctgtgccattgtccagctgccttctgactggatccaggtggctgagctttaccagagcctggctgagggagataagaataagctggtgcccctgcccgcctgtctccgtactgccatgacggacaaatttgcccagtttgacgagtaccagctggctaagtacaaccctcggaagcaccgggccaagagacacccccgccggccaccccgctctccagggatggagcctccattttctcacagatgttttccaaggtacatagggtttctcagagaagagcagagaaagtttgagaaggccggtgatacagtgtcagagaaaaagaatcctccaaggttcaccctgaagaagctggttcagcgactgcacatccacaagcctgcccagcacgttcaagccctgctgggttacagatacccctccaacctacagctcttttctcgaagtcgccttcctgggccttgggattctagcagagctgggaagaggatgaagctgtctaggccagagacctgggagcgggagctgagcctacgggggaacaaagcgtcggtctgggaggaactcattgaaaatgggaagcttcccttcatggccatgcttcggaacctgtgcaacctgctgcgggttggaatcagttcccgccaccatgagctcattctccagagactccagcatgggaagtcggtgatccacagtcggcagtttccattcagatttcttaacgcccatgatgccattgatgccctcgaggctcaactcagaaatcaagcattgccctttccttcgaatataacactgatgaggcggatactaactagaaatgaaaagaaccgtcccaggcggaggtttctttgccacctaagccgtcagcagcttcgtatggcaatgaggatacctgtgttgtatgagcagctcaagagggagaagctgagagtacacaaggccagacagtggaaatatgatggtgagatgctgaacaggtaccgacaggccctagagacagctgtgaacctctctgtgaagcacagcctgcccctgctgccaggccgcactgtcttggtctatctgacagatgctaatgcagacaggctctgtccaaagagcaacccacaagggcccccgctgaactatgcactgctgttgattgggatgatgatcacgagggcggagcaggtggacgtcgtgctgtgtggaggtgacactctgaagactgcagtgcttaaggcagaagaaggcatcctgaagactgccatcaagctccaggctcaagtccaggagtttgatgaaaatgatggatggtccctgaatacttttgggaaatacctgctgtctctggctggccaaagggttcctgtggacagggtcatcctccttggccaaagcatggatgatggaatgataaatgtggccaaacagctttactggcagcgtgtgaattccaagtgcctctttgttggtatcctcctaagaagggtacaatacctgtcaacagatttgaatcccaatgatgtgacactctcaggctgtactgatgcgatactgaagttcattgcagagcatggggcctcccatcttctggaacatgtgggccaaatggacaaaatattcaagattccaccacccccaggaaagacaggggtccagtctctccggccactggaagaggacactccaagccccttggctcctgtttcccagcaaggatggcgcagcatccggcttttcatttcatccactttccgagacatgcacggggagcgggacctgctgctgaggtctgtgctgccagcactgcaggcccgagcggcccctcaccgtatcagccttcacggaatcgacctccgctggggcgtcactgaggaggagacccgtaggaacagacaactggaagtgtgccttggggaggtggagaacgcacagctgtttgtggggattctgggctcccgttatggatacattccccccagctacaaccttcctgaccatccacacttccactgggcccagcagtacccttcagggcgctctgtgacagagatggaggtgatgcagttcctgaaccggaaccaacgtctgcagccctctgcccaagctctcatctacttccgggattccagcttcctcagctctgtgccagatgcctggaaatctgactttgtttctgagtctgaagaggccgcatgtcggatctcagaactgaagagctacctaagcagacagaaagggataacctgccgcagatacccctgtgagtgggggggtgtggcagctggccggccctatgttggcgggctggaggagtttgggcagttggttctgcaggatgtatggaatatgatccagaagctctacctgcagcctggggccctgctggagcagccagtgtccatcccagacgatgacttggtccaggccaccttccagcagctgcagaagccaccgagtcctgcccggccacgccttcttcaggacacagtgcaacagctgatgctgccccacggaaggctgagcctggtgacggggcagtcaggacagggcaagacagccttcctggcatctcttgtgtcagccctgcaggctcctgatggggccaaggtggcaccattagtcttcttccacttttctggggctcgtcctgaccagggtcttgccctcactctgctcagacgcctctgtacctatctgcgtggccaactaaaagagccaggtgccctccccagcacctaccgaagcctggtgtgggagctgcagcagaggctgctgcccaagtctgctgagtccctgcatcctggccagacccaggtcctgatcatcgatggggctgataggttagtggaccagaatgggcagctgatttcagactggatcccaaagaagcttccccggtgtgtacacctggtgctgagtgtgtctagtgatgcaggcctaggggagacccttgagcagagccagggtgcccacgtgctggccttggggcctctggaggcctctgctcgggcccggctggtgagagaggagctggccctgtacgggaagcggctggaggagtcaccatttaacaaccagatgcgactgctgctggtgaagcgggaatcaggccggccgctctacctgcgcttggtcaccgatcacctgaggctcttcacgctgtatgagcaggtgtctgagagactccggaccctgcctgccactgtccccctgctgctgcagcacatcctgagcacactggagaaggagcacgggcctgatgtccttccccaggccttgactgccctagaagtcacacggagtggtttgactgtggaccagctgcacggagtgctgagtgtgtggcggacactaccgaaggggactaagagctgggaagaagcagtggctgctggtaacagtggagacccctaccccatgggcccgtttgcctgcctcgtccagagtctgcgcagtttgctaggggagggccctctggagcgccctggtgcccggctgtgcctccctgatgggcccctgagaacagcagctaaacgttgctatgggaagaggccagggctagaggacacggcacacatcctcattgcagctcagctctggaagacatgtgacgctgatgcctcaggcaccttccgaagttgccctcctgaggctctgggagacctgccttaccacctgctccagagcgggaaccgtggacttctttcgaagttccttaccaacctccatgtggtggctgcacacttggaattgggtctggtctctcggctcttggaggcccatgccctctatgcttcttcagtccccaaagaggaacaaaagctccccgaggctgacgttgcagtgtttcgcaccttcctgaggcagcaggcttcaatcctcagccagtacccccggctcctgccccagcaggcagccaaccagcccctggactcacctctttgccaccaagcctcgctgctctcccggagatggcacctccaacacacactacgatggcttaataaaccccggaccatgaaaaatcagcaaagctccagcctgtctctggcagtttcctcatcccctactgctgtggccttctccaccaatgggcaaagagcagctgtgggcactgccaatgggacagtttacctgttggacctgagaacttggcaggaggagaagtctgtggtgagtggctgtgatggaatctctgcttgtttgttcctctccgatgatacactctttcttactgccttcgacgggctcctggagctctgggacctgcagcatggttgtcgggtgctgcagactaaggctcaccagtaccaaatcactggctgctgcctgagcccagactgccggctgctagccaccgtgtgcttgggaggatgcctaaagctgtgggacacagtccgtgggcagctggccttccagcacacctaccccaagtccctgaactgtgttgccttccacccagaggggcaggtaatagccacaggcagctgggctggcagcatcagcttcttccaggtggatgggctcaaagtcaccaaggacctgggggcacccggagcctctatccgtaccttggccttcaatgtgcctgggggggttgtggctgtgggccggctggacagtatggtggagctgtgggcctggcgagaaggggcacggctggctgccttccctgcccaccatggctttgttgctgctgcgcttttcctgcatgcgggttgccagttactgacggctggagaggatggcaaggttcaggtgtggtcagggtctctgggtcggccccgtgggcacctgggttccctttctctctctcctgccctctctgtggcactcagcccagatggtgatcgggtggctgttggatatcgagcggatggcattaggatctacaaaatctcttcaggttcccagggggctcagggtcaggcactggatgtggcagtgtccgccctggcctggctaagccccaaggtattggtgagtggtgcagaagatgggtccttgcagggctgggcactcaaggaatgctcccttcagtccctctggctcctgtccagattccagaagcctgtgctaggactggccacttcccaggagctcttggcttctgcctcagaggatttcacagtgcagctgtggccaaggcagctgctgacgcggccacacaaggcagaagactttccctgtggcactgagctgcggggacatgagggccctgtgagctgctgtagtttcagcactgatggaggcagcctggccaccgggggccgggatcggagtctcctctgctgggacgtgaggacacccaaaacccctgttttgatccactccttccctgcctgtcaccgtgactgggtcactggctgtgcctggaccaaagataacctactgatatcctgctccagtgatggctctgtggggctctgggacccagagtcaggacagcggcttggtcagttcctgggtcatcagagtgctgtgagcgctgtggcagctgtggaggagcacgtggtgtctgtgagccgggatgggaccttgaaagtgtgggaccatcaaggcgtggagctgaccagcatccctgctcactcaggacccattagccactgtgcagctgccatggagccccgtgcagctggacagcctgggtcagagcttctggtggtaaccgtcgggctagatggggccacacggttatggcatccactcttggtgtgccaaacccacaccctcctgggacacagcggcccagtccgtgctgctgctgtttcagaaacctcaggcctcatgctgaccgcctctgaggatggttctgtacggctctggcaggttcctaaggaagcagatgacacatgtataccaaggagttctgcagccgtcactgctgtggcttgggcaccagatggttccatggcagtatctggaaatcaagctggggaactaatcttgtggcaggaagctaaggctgtggccacagcacaggctccaggccacattggtgctctgatctggtcctcggcacacaccttttttgtcctcagtgctgatgagaaaatcagcgagtggcaagtgaaactgcggaagggttcggcacccggaaatttgagtcttcacctgaaccgaattctacaggaggacttaggggtgctgacaagtctggattgggctcctgatggtcactttctcatcttggccaaagcagatttgaagttactttgcatgaagccaggggatgctccatctgaaatctggagcagctatacagaaaatcctatgatattgtccacccacaaggagtatggcatatttgtcctgcagcccaaggatcctggagttctttctttcttgaggcaaaaggaatcaggagagtttgaagagaggctgaactttgatataaacttagagaatcctagtaggaccctaatatcgataactcaagccaaacctgaatctgagtcctcatttttgtgtgccagctctgatgggatcctatggaacctggccaaatgcagcccagaaggagaatggaccacaggtaacatgtggcagaaaaaagcaaacactccagaaacccaaactccagggacagacccatctacctgcagggaatctgatgccagcatggatagtgatgccagcatggatagtgagccaacaccacatctaaagacacggcagcgtagaaagattcactcgggctctgtcacagccctccatgtgctacctgagttgctggtgacagcttcgaaggacagagatgttaagctatgggagagacccagtatgcagctgctgggcctgttccgatgcgaagggtcagtgagctgcctggaaccttggctgggcgctaactccaccctgcagcttgccgtgggagacgtgcagggcaatgtgtactttctgaattgggaatgaagatgtgccactcgggaataatgataccccttgtgctagagatgcaaagcctgaagacactggtagcttttaataattataaaattaataatttcttgataattataaaaatgaagtgtcaaaaaatctcaagtgtaggcctgcctgtgttctcatgtggatttagaacaggaggatattctatgtgtatgtatatgtacattctaatgtgtgtctcttcttattcaacattaatccttactagaaccacaagaaagtgaatgaaatctttagtaggtactcttttgaaactaggttntagaattcttgcatcactcgcgggccctaggaccctaggatgccattcttgccaggaggaggaatgagagtgatgttggccaacattcaatttgaacagagcatggaagacctttcagttcatcgggaaagaatgagggagggagaataagtcagtcatgcatcagggcatttagaaagagctatgtttctgtcacagagacagcccttttctcagaactacccagaggaggccgggcatggtggctcacgcttgtaatcccagcactttgggaggccgaggtgggcagatcacgaggtcaggagatcaagaccatcctggctaacatagtgaaaccctgtctctactaaaaaatacaaaaagttaaccaggcatgtagcggccgctctagaggatccaagctt

SEQ ID NO: 171 - DNA, 2362 bp, Homo sapiens
  misc_feature: solute carrier family 27 (fatty acid transporter), member 2
ggaattccaaaaaaaaaaaatacgactacacctgctccggagcccgcggcggtacctgcagcggaggagctctgtcttccccttcatctcacgcgagcccggcgtcccgccgcgtgcgccccggcgcagcccgccagtccgcccggagcccgcccagtcgccgcgctgcacgcccggggtgaaccctctgccctcgctgggacagagggccccgcagccgtcatgctttccgccatctacacagtcctggcgggactgctgttcctgccgctcctggtgaacctctgctgcccatacttcttccaggacataggctacttcttgaaggtggccgccgtgggccggagggtgcgcagctacgggcagcggcggccggcgcgcaccatcctgcgggcgttcctggagaaagcgcgccagacgccacacaagccttttctgctcttccgcgacgagactctcacctacgcgcaggtggaccggcgcagcaatcaagtggcccgggcgctgcacgaccacctcggcctgcgccagggagactgcgtggcgctccttatgggtaacgagccggcctacgtgtggctgtggctggggctggtgaagctgggctgtgccatggcgtgcctcaattacaacatccgcgcgaagtccctgctgcactgcttccagtgctgcggggcgaaggtgctgctggtgtcgccagaactacaagcagctgtcgaagagatactgccaagccttaaaaaagatgatgtgtccatctattatgtgagcagaacttctaacacagatgggattgactctttcctggacaaagtggatgaagtatcaactgaacctatcccagagtcatggaggtctgaagtcactttttccactcctgccttatacatttatacttctggaaccacaggtcttccaaaagcagccatgatcactcatcagcgcatatggtatggaactggcctcacttttgtaagcggattgaaggcagatgatgtcatctatatcactctgcccttttaccacagtgctgcactactgattggcattcacggatgtattgtggctggtgctactcttgccttgcggactaaattttcagccagccagttttgggatgactgcagaaaatacaacgtcactgtcattcagtatatcggtgaactgcttcggtatttatgcaactcaccacagaaaccaaatgaccgtgatcataaagtgagactggcactgggaaatggcttacgaggagatgtgtggagacaatttgtcaagagatttggggacatatgcatctatgagttctatgctgccactgaaggcaatattggatttatgaattatgcgagaaaagttggtgctgttggaagagtaaactacctacagaaaaaaatcataacttatgacctgattaaatatgatgtggagaaagatgaacctgtccgagatgaaaatggatattgcgtcagagttcccaaaggtgaagttggacttctggtttgcaaaatcacacaacttacaccatttaatggctatgctggagcaaaggctcagacagagaagaaaaaactgagagatgtctttaagaaaggagacctctatttcaacagtggagatctcttaatggttgaccatgaaaatttcatctatttccacgacagagttggagatacattccggtggaaaggggaaaatgtggccaccactgaagttgctgatacagttggactggttgattttgtccaagaagtaaatgtttatggagtgcatgtgccagatcatgagggtcgcattggcatggcctccatcaaaatgaaagaaaaccatgaatttgatggaaagaaactctttcagcacattgctgattacctacctagttatgcaaggccccggtttctaagaatacaggacaccattgagatcactggaacttttaaacaccgcaaaatgaccctggtggaggagggctttaaccctgctgtcatcaaagatgccttgtatttcttggatgacacagcaaaaatgtatgtgcctatgactgaggacatctataatgccataagtgctaaaaccctgaaactctgaatattcccaggaggataactcaacatttccagaaagaaactgaatggacagccacttgatataatccaactttaatttgattgaagattgtgaggaaattttgtaggaaatttgcatacccgtaaagggagacttttttaaataacagttgagtctttgcaagtaaaaagatttagagattattatttttcagtgtgcacctactgtttgtatttgcaaactgagcttgttggagggaaggcattattttttaaaatacttagtaaattaaatgaac

SEQ ID NO: 172 - DNA, 4740 bp, Homo sapiens
  misc_feature: integrin, alpha M (complement component receptor 3, alpha; also known as CD11b (p170), macrophage antigen alpha polypeptide) /// integrin, alpha M (complement component receptor 3, alpha; also known as CD11b (p170), macrophage antigen alpha polypeptide)
tggcttccttgtggttcctcagtggtgcctgcaacccctggttcacctccttccaggttctggctccttccagccatggctctcagagtccttctgttaacagccttgaccttatgtcatgggttcaacttggacactgaaaacgcaatgaccttccaagagaacgcaaggggcttcgggcagagcgtggtccagcttcagggatccagggtggtggttggagccccccaggagatagtggctgccaaccaaaggggcagcctctaccagtgcgactacagcacaggctcatgcgagcccatccgcctgcaggtccccgtggaggccgtgaacatgtccctgggcctgtccctggcagccaccaccagcccccctcagctgctggcctgtggtcccaccgtgcaccagacttgcagtgagaacacgtatgtgaaagggctctgcttcctgtttggatccaacctacggcagcagccccagaagttcccagaggccctccgagggtgtcctcaagaggatagtgacattgccttcttgattgatggctctggtagcatcatcccacatgactttcggcggatgaaggagtttgtctcaactgtgatggagcaattaaaaaagtccaaaaccttgttctctttgatgcagtactctgaagaattccggattcactttaccttcaaagagttccagaacaaccctaacccaagatcactggtgaagccaataacgcagctgcttgggcggacacacacggccacgggcatccgcaaagtggtacgagagctgtttaacatcaccaacggagcccgaaagaatgcctttaagatcctagttgtcatcacggatggagaaaagtttggcgatcccttgggatatgaggatgtcatccctgaggcagacagagagggagtcattcgctacgtcattggggtgggagatgccttccgcagtgagaaatcccgccaagagcttaataccatcgcatccaagccgcctcgtgatcacgtgttccaggtgaataactttgaggctctgaagaccattcagaaccagcttcgggagaagatctttgcgatcgagggtactcagacaggaagtagcagctcctttgagcatgagatgtctcaggaaggcttcagcgctgccatcacctctaatggccccttgctgagcactgtggggagctatgactgggctggtggagtctttctatatacatcaaaggagaaaagcaccttcatcaacatgaccagagtggattcagacatgaatgatgcttacttgggttatgctgccgccatcatcttacggaaccgggtgcaaagcctggttctgggggcacctcgatatcagcacatcggcctggtagcgatgttcaggcagaacactggcatgtgggagtccaacgctaatgtcaagggcacccagatcggcgcctacttcggggcctccctctgctccgtggacgtggacagcaacggcagcaccgacctggtcctcatcggggccccccattactacgagcagacccgagggggccaggtgtccgtgtgccccttgcccagggggagggctcggtggcagtgtgatgctgttctctacggggagcagggccaaccctggggccgctttggggcagccctaacagtgctgggggacgtaaatggggacaagctgacggacgtggccattggggccccaggagaggaggacaaccggggtgctgtttacctgtttcacggaacctcaggatctggcatcagcccctcccatagccagcggatagcaggctccaagctctctcccaggctccagtattttggtcagtcactgagtgggggccaggacctcacaatggatggactggtagacctgactgtaggagcccaggggcacgtgctgctgctcaggtcccagccagtactgagagtcaaggcaatcatggagttcaatcccagggaagtggcaaggaatgtatttgagtgtaatgatcaggtggtgaaaggcaaggaagccggagaggtcagagtctgcctccatgtccagaagagcacacgggatcggctaagagaaggacagatccagagtgttgtgacttatgacctggctctggactccggccgcccacattcccgcgccgtcttcaatgagacaaagaacagcacacgcagacagacacaggtcttggggctgacccagacttgtgagaccctgaaactacagttgccgaattgcatcgaggacccagtgagccccattgtgctgcgcctgaacttctctctggtgggaacgccattgtctgctttcgggaacctccggccagtgctggcggaggatgctcagagactcttcacagccttgtttccctttgagaagaattgtggcaatgacaacatctgccaggatgacctcagcatcaccttcagtttcatgagcctggactgcctcgtggtgggtgggccccgggagttcaacgtgacagtgactgtgagaaatgatggtgaggactcctacaggacacaggtcaccttcttcttcccgcttgacctgtcctaccggaaggtgtccacactccagaaccagcgctcacagcgatcctggcgcctggcctgtgagtctgcctcctccaccgaagtgtctggggccttgaagagcaccagctgcagcataaaccaccccatcttcccggaaaactcagaggtcacctttaatatcacgtttgatgtagactctaaggcttcccttggaaacaaactgctcctcaaggccaatgtgaccagtgagaacaacatgcccagaaccaacaaaaccgaattccaactggagctgccggtgaaatatgctgtctacatggtggtcaccagccatggggtctccactaaatatctcaacttcacggcctcagagaataccagtcgggtcatgcagcatcaatatcaggtcagcaacctggggcagaggagcccccccatcagcctggtgttcttggtgcccgtccggctgaaccagactgtcatatgggaccgcccccaggtcaccttctccgagaacctctcgagtacgtgccacaccaaggagcgcttgccctctcactccgactttctggctgagcttcggaaggcccccgtggtgaactgctccatcgctgtctgccagagaatccagtgtgacatcccgttctttggcatccaggaagaattcaatgctaccctcaaaggcaacctctcgtttgactggtacatcaagacctcgcataaccacctcctgatcgtgagcacagctgagatcttgtttaacgattccgtgttcaccctgctgccgggacagggggcgtttgtgaggtcccagacggagaccaaagtggagccgttcgaggtccccaaccccctgccgctcatcgtgggcagctctgtcgggggactgctgctcctggccctcatcaccgccgcgctgtacaagctcggcttcttcaagcggcaatacaaggacatgatgagtgaagggggtcccccgggggccgaaccccagtagcggctccttcccgacagagctgcctctcggtggccagcaggactctgcccagaccacacgagcccccaggctgctggacacgtcggacagcgaagtatccccgacaggacgggcttgggcttccatttgtgtgtgtgcaagtgtgtatgtgcgtgtgtgcgagtgtgtgcaagtgtctgtgtgcaagtgtgtgcacgtgtgcgtgtgcgtgcatgtgcactcgcacgcccatgtgtgagtgtgtgcaagtatgtgagtgtgtccagtgtgtgtgcgtgtgtccatgtgtgtgcagtgtgtgcatgtgtgcgagtgtgtgcatgtgtgtgctcaggggctgtggctcacgtgtgtgactcagagtgtctctggcgtgtgggtaggtgacggcagcgtagcctctccggcagaagggaactgcctgggctcccttgtgcgtgggtaagccgctgctgggttttcctccgggagaggggacggtcaatcctgtgggtgaagagagagggaaacacagcagcatctctccactgaaagaagtgggacttcccgtcgcctgcgagcctgcggcctgctggagcctgcgcagcttggatggatactccatgagaaaagccgtgggtggaaccaggagcctcctccacaccagcgctgatgcccaataaagatgcccactgaggaatcatgaagcttcctttctggattcatttattatttcaatgtgactttaattttttggatggataagcctgtctatggtacaaaaatcacaaggcattcaagtgtacagtgaaaagtctccctttccagatattcaagtcacctccttaaaggtagtcaagattgtgttttgaggtttccttcagacagattccaggcgatgtgcaagtgtatgcacgtgtgcacacaccacacacatacacacacacaagcttttttacacaaatggtagcatactttatattggtctgtatcttgctttttttcaccaatatttctcagacatcggttcatattaagacataaattactttttcattcttttataccgctgcatagtattccattgtgtgagtgtaccataatgtatttaaccagtcttcttttgatatactattttcatctcttgttattgcatctgctgagttaataaatcaaatatatgtcaaaaaaaaaaaaaaaaaaaaaaaaaaaaaaaaaaaaaaaaat

SEQ ID NO: 173 - DNA, 3100 bp, Homo sapiens
  misc_feature: chemokine (C-X3-C motif) receptor 1
actcgtctctggtaaagtctgagcaggacagggtggctgactggcagatccagaggttcccttggcagtccacgccaggccttcaccatggatcagttccctgaatcagtgacagaaaactttgagtacgatgatttggctgaggcctgttatattggggacatcgtggtctttgggactgtgttcctgtccatattctactccgtcatctttgccattggcctggtgggaaatttgttggtagtgtttgccctcaccaacagcaagaagcccaagagtgtcaccgacatttacctcctgaacctggccttgtctgatctgctgtttgtagccactttgcccttctggactcactatttgataaatgaaaagggcctccacaatgccatgtgcaaattcactaccgccttcttcttcatcggcttttttggaagcatattcttcatcaccgtcatcagcattgataggtacctggccatcgtcctggccgccaactccatgaacaaccggaccgtgcagcatggcgtcaccatcagcctaggcgtctgggcagcagccattttggtggcagcaccccagttcatgttcacaaagcagaaagaaaatgaatgccttggtgactaccccgaggtcctccaggaaatctggcccgtgctccgcaatgtggaaacaaattttcttggcttcctactccccctgctcattatgagttattgctacttcagaatcatccagacgctgttttcctgcaagaaccacaagaaagccaaagccattaaactgatccttctggtggtcatcgtgtttttcctcttctggacaccctacaacgttatgattttcctggagacgcttaagctctatgacttctttcccagttgtgacatgaggaaggatctgaggctggccctcagtgtgactgagacggttgcatttagccattgttgcctgaatcctctcatctatgcatttgctggggagaagttcagaagatacctttaccacctgtatgggaaatgcctggctgtcctgtgtgggcgctcagtccacgttgatttctcctcatctgaatcacaaaggagcaggcatggaagtgttctgagcagcaattttacttaccacacgagtgatggagatgcattgctccttctctgaagggaatcccaaagccttgtgtctacagagaacctggagttcctgaacctgatgctgactagtgaggaaagatttttgttgttatttcttacaggcacaaaatgatggacccaatgcacacaaaacaaccctagagtgttgttgagaattgtgctcaaaatttgaagaatgaacaaattgaactctttgaatgacaaagagtagacatttctcttactgcaaatgtcatcagaactttttggtttgcagatgacaaaaattcaactcagactagtttagttaaatgagggtggtgaatattgttcatattgtggcacaagcaaaagggtgtctgagccctcaaagtgaggggaaaccagggcctgagccaagctagaattccctctctctgactctcaaatcttttagtcattatagatcccccagactttacatgacacagctttatcaccagagagggactgacacccatgtttctctggccccaagggaaaattcccagggaagtgctctgataggccaagtttgtatcaggtgcccatccctggaaggtgctgttatccatggggaagggatatataagatggaagcttccagtccaatctcatggagaagcagaaatacatatttccaagaagttggatgggtgggtactattctgattacacaaaacaaatgccacacatcacccttaccatgtgcctgatccagcctctcccctgattacaccagcctcgtcttcattaagccctcttccatcatgtccccaaacctgcaagggctccccactgcctactgcatcgagtcaaaactcaaatgcttggcttctcatacgtccaccatggggtcctaccaatagattccccattgcctcctccttcccaaaggactccacccatcctatcagcctgtctcttccatatgacctcatgcatctccacctgctcccaggccagtaagggaaatagaaaaaccctgcccccaaataagaagggatggattccaaccccaactccagtagcttgggacaaatcaagcttcagtttcctggtctgtagaagagggataaggtacctttcacatagagatcatcctttccagcatgaggaactagccaccaactcttgcaggtctcaacccttttgtctgcctcttagacttctgctttccacacctgcactgctgtgctgtgcccaagttgtggtgctgacaaagcttggaagagcctgcaggtgccttggccgcgtgcatagcccagacacagaagaggctggttcttacgatggcacccagtgagcactcccaagtctacagagtgatagccttccgtaacccaactctcctggactgccttgaatatcccctcccagtcaccttgtgcaagcccctgcccatctgggaaaataccccatcattcatgctactgccaacctggggagccagggctatgggagcagcttttttttcccccctagaaacgtttggaacaatgtaaaactttaaagctcgaaaacaattgtaataatgctaaagaaaaagtcatccaatctaaccacatcaatattgtcattcctgtattcacccgtccagaccttgttcacactctcacatgtttagagttgcaatcgtaatgtacagatggttttataatctgatttgttttcctcttaacgttagaccacaaatagtgctcgctttctatgtagtttggtaattatcattttagaagactctaccagactgtgtattcattgaagtcagatgtggtaactgttaaattgctgtgtatctgatagctctttggcagtctatatgtttgtataatgaatgagagaataagtcatgttccttcaagatcatgtaccccaatttacttgccattactcaattgataaacatttaacttgtttccaatgtttagcaaatacatattttatagaacttc

SEQ ID NO: 174 - DNA, 1807 bp, Homo sapiens
  misc_feature: polymerase (DNA directed), epsilon 2 (p59 subunit)
ctttccgtccccttgcttcgtcttcgcttttctttctacttattcttatctgtgtctttcgctttgtttgcctctccgtctgttttccctcagggcccccttctttcctcgaccttttcaaatcgcaaatatggcgccggagcggctgcggagccgggcgccctccgccttcaagttgcggggcttgctgctccgtggtgaagctattaagtacctcacagaagctcttcagtctatcagtgaattagagcttgaagataaactggaaaagataattaatgcagttgagaagcaacccttgtcatcaaacatgattgaacgatctgtggtggaagcagcagtccaggaatgcagtcagtctgttgatgaaactatagagcacgttttcaatatcataggagcatttgatattccacgctttgtgtacaattcagaaagaaaaaaatttcttcctctgttaatgaccaaccaccctgcaccaaatttatttggaacaccaagagataaagcagagatgtttcgtgagcgatataccattttgcaccagaggacccacaggcatgaattatttactcctccggtgataggttctcaccctgatgaaagcggaagcaaattccagcttaaaacaatagaaaccttattgggtagtacaaccaaaatcggagatgcgattgttcttggaatgataacgcagttaaaagagggaaaattttttctggaagatcctactggaacagtccaactagaccttagtaaagctcagttccatagtggtttatacacagaggcatgctttgtcttagcagaaggttggtttgaagatcaagtgtttcatgtcaatgcctttggatttccacccactgagccctctagtactactagggcatactatggaaatattaatttttttggaggtccttctaatacatctgtgaagacttctgcaaaactaaaacagctagaagaggagaataaagatgctatgtttgtgtttttatctgatgtttggttggaccaggtggaagtattggaaaaacttcgcataatgtttgctggttattcaccagcacctccaacctgctttattctgtgtggtaatttttcatctgcaccatatggaaaaaatcaagttcaagctttgaaagattccctaaaaactttggcagatataatatgtgaatacccagatattcaccaaagtcgttttgtgtttgtacctggtccagaggatcctggatttggttccatcttaccaaggccaccacttgctgaaagcatcactaatgaattcagacaaagggtaccattttcagtttttactactaatccttgcagaattcagtactgtacacaggaaattactgtcttccgtgaagacttagtaaataaaatgtgcagaaactgcgtccgttttcctagcagcaatttggctattcctaatcactttgtaaagactatcttatcccaaggacatctgactcccctacctctttatgtctgcccagtgtattgggcatatgactatgctttgagagtgtatcctgtgcccgatctacttgtcattgcagacaaatatgatcctttcactacgacaaataccgaatgcctctgcataaaccctggctcttttccaagaagtggattttcattcaaagttttttatccttctaataagacagtagaagatagcaaacttcaaggcttttgagattcttaaagatcatctgaagaaaattcatcagttttctgcttaactctatatcttatgtgattctgatattacaataaaattatggtaaacttt

SEQ ID NO: 175 - DNA, 3062 bp, Homo sapiens
  misc_feature: hexokinase 3 (white cell)
gacaagagctcagacctgaggagagtgactagcttctctgtgtcccaggtggccaccttccactgtggaagctcatggactccattgggtcttcagggttgcggcagggggaagaaaccctgagttgctctgaggagggcttgcccgggccctcagacagctcagagctggtgcaggagtgcctgcagcagttcaaggtgacaagggcacagctacagcagatccaagccagcctcttgggttccatggagcaggcgctgaggggacaggccagccctgcccctgcggtccggatgctgcctacatacgtggggtccaccccacatggcactgagcaaggagacttcgtggtgctggagctgggggccacaggggcctcactgcgtgttttgtgggtgactctaactggcattgaggggcatagggtggagcccagaagccaggagtttgtgatcccccaagaggtgatgctgggtgctggccagcagctctttgactttgctgcccactgcctgtctgagttcctggatgcgcagcctgtgaacaaacagggtctgcagcttggcttcagcttctctttcccttgtcaccagacgggcttggacaggagcaccctcatttcctggaccaaaggttttaggtgcagtggtgtggaaggccaggatgtggtccagctgctgagagatgccattcggaggcagggggcctacaacatcgacgtggttgctgtggtgaacgacacagtgggcaccatgatgggctgtgagccgggggtcaggccgtgtgaggttgggctagttgtagacacgggcaccaacgcgtgttacatggaggaggcacggcatgtggcagtgctggacgaagaccggggccgcgtctgcgtcagcgtcgagtggggctccttaagcgatgatggggcgctgggaccagtgctgaccaccttcgaccataccctggaccatgagtccctgaatcctggtgctcagaggtttgagaagatgatcggaggcctgtacctgggtgagctggtgcggctggtgctggctcacttggcccggtgtggggtcctctttggtggctgcacctcccctgccctgctgagccaaggcagcatcctcctggaacacgtggctgagatggaggacccctctactggggcagcccgtgtccatgctatcctgcaggacttgggcctgagccctggggcttcggatgttgagcttgtgcagcacgtctgtgcggccgtgtgcacgcgggctgcccagctctgtgctgccgccctggccgctgttctctcctgcctccagcacagccgggagcaacaaacactccaggttgctgtggccaccggaggccgagtgtgtgagcggcaccccaggttctgcagcgtcctgcaggggacagtgatgctcctggccccggaatgcgatgtctccttaatcccctctgtggatggtggtggccggggagtggcgatggtgactgctgtggctgcccgtctggctgcccaccggcgcctgctggaggagaccctggccccattccggttgaaccatgatcaactggctgcggttcaggcacagatgcggaaggccatggccaaggggctccgaggggaggcctcctcccttcgcatgctgcccactttcgtccgggccacccctgacggcagcgagcgaggggatttcctggccctggacctcgggggcacgaacttccgtgtcctcctggtacgtgtgaccacaggcgtgcagatcaccagcgagatctactccattcccgagactgtggcccagggttctgggcagcagctctttgaccacatcgtggactgcatcgtggacttccagcagaagcagggcctgagcgggcagagcctcccactgggttttaccttctccttcccatgtaggcagcttggcctagaccagggcatcctcctgaactggaccaagggtttcaaggcatcagactgcgagggccaagatgtcgtgagtctgttgcgggaagccatcactcgcagacaggcagtggagctgaatgtggttgccattgtcaatgacacggtggggaccatgatgtcctgtggctatgaggacccccgttgcgagataggcctcattgtcggaaccggcaccaatgcctgctacatggaggagctccggaatgtggcgggcgtgcctggggactcaggccgcatgtgcatcaacatggagtggggcgcctttggggacgatggctctctggccatgctcagcacccgctttgatgcaagtgtggaccaggcgtccatcaaccccggcaagcagaggtttgaaaagatgatcagcggcatgtacctgggggagatcgtccgccacatccttttacatttaaccagccttggcgttctcttccggggccagcagatccagcgccttcagaccagggacatcttcaagaccaagttcctctctgagatcgaaagtgacagcctggccctgcggcaggtccgagccatcctagaggatctggggctacccctgacctcagatgacgccctgatggtgctagaggtgtgccaggctgtgtcccagagggctgcccagctctgtggggcgggtgtagctgccgtggtggagaagatccgggggaaccggggcctggaagagctggcagtgtctgtgggggtggatggaacgctctacaagctgcacccgcgcttctccagcctggtggcggccacagtgcgggagctggcccctcgctgtgtggtcacgttcctgcagtcagaggatgggtccggcaaaggtgcggccctggtcaccgctgttgcctgccgccttgcgcagttgactcgtgtctgaggaaacctccaggctgaggaggtctccgccgcagccttgctggagccgggtcggggtctgcctgtttcccagccaggcccagccacccaggactcctgggacatcccatgtgtgacccctctgcggccatttggccttgctccctggctttccctgagagaagtagcactcaggttagcaatatatatatataatttatttacaaaaaaaaaaaaa

SEQ ID NO: 176 - DNA, 2786 bp, Homo sapiens
  misc_feature: a disintegrin and metalloproteinase domain 28
gcgagaagagcagacaccgtgctcctggaatcacccagcatgttgcaaggtctcctgccagtcagtctcctcctctctgttgcagtaagtgctataaaagaactccctggggtgaagaagtatgaagtggtttatcctataagacttcatccactgcataaaagagaggccaaagagccagagcaacaggaacaatttgaaactgaattaaagtataaaatgacaattaatggaaaaattgcagtgctttatttgaaaaaaaacaagaacctccttgcaccaggctacacggaaacatattataattccactggaaaggagatcaccacaagcccacaaattatggatgattgttattatcaaggacatattcttaatgaaaaggtttctgacgctagcatcagcacatgtaggggtctaaggggctacttcagtcagggggatcaaagatactttattgaacctttaagccccatacatcgggatggacaggagcatgcactcttcaagtataaccctgatgaaaagaattatgacagcacctgtgggatggatggtgtgttgtgggcccacgatttgcagcagaacattgccctacctgccaccaaactagtaaaattgaaagacaggaaggttcaggaacatgagaaatacatagaatattatctggtcctggataatggtgagtttaaaaggtacaatgagaatcaagatgagatcagaaagagggtatttgagatggctaattatgtcaacatgctttataaaaagctcaatactcatgtggccttagttggtatggaaatctggactgacaaggataagataaagataaccccaaatgcaagcttcaccttggagaatttttctaaatggagggggagtgttctctcaagaagaaagcgtcatgatattgctcagttaatcacagcaacagaacttgctggaacgactgtgggtcttgcatttatgtctacaatgtgttctccttattctgttggcgttgttcaggaccacagcgataatcttcttagagttgcagggacaatggcacatgaaatgggccacaactttggaatgtttcatgacgactattcttgcaagtgtccttctacaatatgtgtgatggacaaagcactgagcttctatatacccacagacttcagttcctgcagccgtctcagctatgacaagttttttgaagataaattatcaaattgcctctttaatgctccattgcctacagatatcatatccactccaatttgtgggaaccagttggtggaaatgggagaggactgtgattgtgggacatctgaggaatgtaccaatatttgctgtgatgctaagacatgtaaaatcaaagcaacttttcaatgtgcattaggagaatgttgtgaaaaatgccaatttaaaaaggctgggatggtgtgcagaccagcaaaagatgagtgcgacctgcctgaaatgtgtaatggtaaatctggtaattgtcctgatgatagattccaagtcaatggcttcccttgccatcacgggaagggccactgcttgatgggcacatgccccacactgcgggagcagtgcacagagctgtggggaccaggaactgaggttgcagataagtcatgttacaacaggaatgaaggtgggtcaaagtacgggtactgtcgcagagtggatgacacactcattccctgcaaagcaaatgataccatgtgtgggaagttgttctgtcaaggtgggtcggataatttgccctggaaaggacggatagtgactttcctgacatgtaaaacatttgatcctgaagacacaagtcaagaaataggcatggtggccaatggaactaagtgtggcgataacaaggtttgcattaatgcagaatgtgtggatattgagaaagcctacaaatcaaccaattgctcatccaagtgcaaaggacatgctgtgtgtgaccatgagctccagtgtcaatgtgaggaaggatggatccctcccgactgcgatgactcctcagtggtcttccacttctccattgtggttggggtgctgttcccaatggcggtcatttttgtggtggttgctatggtaatccggcaccagagctccagagaaaagcagaagaaagatcagaggccactatctaccactggcaccaggccacacaaacagaagaggaaaccccagatggtaaaggctgttcaaccccaagagatgagtcagatgaagccccatgtgtatgatctgccagtagaaggcaatgagcccccagcctcttttcataaagacacaaacgcacttccccctactgttttcaaggataatccaatgtctacacctaaggactcaaatccagaagcatgaagcaacagctaagcaagaactaatggttaaattatcaacttggaaaacttggaaaatctggatgccagagaaatatactatctcaccagtatttgctctcgactcaagaaggttaacattttctgattcatgttagactttgaagagactaaagaaaattttcaagaggaacatatgcctgagaacctttgcatgaatttaaaatttcaattatccattcttataagaaggaagatgattgtaaagaaatatctccgaagttaaaatctgtaataggaattgattcattctcttaatgaaaacaaaacataaaaacatcacactaatcttaggaataagaaaaattgtacatccattaaatgtacaattgattgcaacatcttgattgcaccaaaaaaaaaaaaaaaaaaaaaaaaaaa

SEQ ID NO: 177 - DNA, 1309 bp, Homo sapiens
  misc_feature: asialoglycoprotein receptor 2
gccagggttgcctgcgggagccaggcgtccgctctccacacctttcacagccccagccctcagagcaacctcagcccagcccagcccagctccagctccagctccagcccgggccccatcatggccaaggactttcaagatatccagcagctgagctcggaggaaaatgaccatcctttccatcaaggtgaggggccaggcactcgcaggctgaatcccaggagaggaaatccatttttgaaagggccacctcctgcccagcccctggcacagcgtctctgctccatggtctgcttcagtctgcttgccctgagcttcaacatcctgctgctggtggtcatctgtgtgactgggtcccaaagtgagggtcacagaggtgcacagctgcaagccgagctgcggagcctgaaggaagctttcagcaacttctcctcgagcaccctgacggaggtccaggcaatcagcacccacggaggcagcgtgggtgacaagatcacatccctaggagccaagctggagaaacagcagcaggacctgaaagcagatcacgatgccctgctcttccatctgaagcacttccccgtggacctgcgcttcgtggcctgccagatggagctcctccacagcaacggctcccaaaggacctgctgccccgtcaactgggtggagcaccaaggcagctgctactggttctctcactccgggaaggcctgggctgaggcggagaagtactgccagctggagaacgcacacctggtggtcatcaactcctgggaggagcagaaattcattgtacaacacacgaaccccttcaatacctggataggtctcacggacagtgatggctcttggaaatgggtggatggcacagactataggcacaactacaagaactgggctgtcactcagccagataattggcacgggcacgagctgggtggaagtgaagactgtgttgaagtccagccggatggccgctggaacgatgacttctgcctgcaggtgtaccgctgggtgtgtgagaaaaggcggaatgccaccggcgaggtggcctgaccccagcacacctctggctaacccataccccacacctgcccagctctggcttctctgttgaggattttgaggaaaggaagaaacactgagacaggggtatggggaagagctgagcaaagagagaaaggaggtagtttaagagtccctgaccctggaggactgagatcccacctccttctgtaattcattgtaattattataatcgtcagcctcttcaatggcgtaggaaagaagaaacaaatgcttgaatctc

SEQ ID NO: 178 - DNA, 1460 bp, Homo sapiens
  misc_feature: interleukin 3 receptor, alpha (low affinity)
gcacacgggaagatatcagaaacatcctaggatcaggacaccccagatcttctcaactggaaccacgaaggctgtttcttccacacagcactttgatctccatttaagcaggcacctctgtcctgcgttccggagctgcgttcccgatggtcctcctttggctcacgctgctcctgatcgccctgccctgtctcctgcaaacgaaggaagatccaaacccaccaatcacgaacctaaggatgaaagcaaaggctcagcagttgacctgggaccttaacagaaatgtgaccgatatcgagtgtgttaaagatgccgactattctatgccggcagtgaacaatagctattgccagtttggagcaatttccttatgtgaagtgaccaactacaccgtccgagtggccaacccaccattctccacgtggatcctcttccctgagaacagtgggaagccttgggcaggtgcggagaatctgacctgctggattcatgacgtggatttcttgagctgcagctgggcggtaggcccgggggcccccgcggacgtccagtacgacctgtacttgaacgttgccaacaggcgtcaacagtacgagtgtcttcactacaaaacggatgctcagggaacacgtatcgggtgtcgtttcgatgacatctctcgactctccagcggttctcaaagttcccacatcctggtgcggggcaggagcgcagccttcggtatcccctgcacagataagtttgtcgtcttttcacagattgagatattaactccacccaacatgactgcaaagtgtaataagacacattcctttatgcactggaaaatgagaagtcatttcaatcgcaaatttcgctatgagcttcagatacaaaagagaatgcagcctgtaatcacagaacaggtcagagacagaacctccttccagctactcaatcctggaacgtacacagtacaaataagagcccgggaaagagtgtatgaattcttgagcgcctggagcaccccccagcgcttcgagtgcgaccaggaggagggcgcaaacacacgtgcctggcggacgtcgctgctgatcgcgctggggacgctgctggccctggtctgtgtcttcgtgatctgcagaaggtatctggtgatgcagagactctttccccgcatccctcacatgaaagaccccatcggtgacagcttccaaaacgacaagctggtggtctgggaggcgggcaaagccggcctggaggagtgtctggtgactgaagtacaggtcgtgcagaaaacttgagactggggttcagggcttgtgggggtctgcctcaatctccctggccgggccaggcgcctgcacagactggctgctggacctgcgcacgcagcccaggaatggacattcctaacgggtggtgggcatgggagatgcctgtgtaatttcgtccgaagctgccaggaagaagaacagaac

SEQ ID NO: 179 - DNA, 598 bp, Homo sapiens
  misc_feature: Charcot-Leyden crystal protein /// Charcot-Leyden crystal protein
caattcagaagagccacccagaaggagacaacaatgtccctgctacccgtgccatacacagaggctgcctctttgtctactggttctactgtgacaatcaaagggcgaccacttgtctgtttcttgaatgaaccatatctgcaggtggatttccacactgagatgaaggaggaatcagacattgtcttccatttccaagtgtgctttggtcgtcgtgtggtcatgaacagccgtgagtatggggcctggaagcagcaggtggaatccaagaacatgccctttcaggatggccaagaatttgaactgagcatctcagtgctgccagataagtaccaggtaatggtcaatggccaatcctcttacacctttgaccatagaatcaagcctgaggctgtgaagatggtgcaagtgtggagagatatctccctgaccaaatttaatgtcagctatttaaagagataaccagacttcatgttgccaaggaatccctgtctctacgtgaacttgggattccaaagccagctaacagcatgatcttttctcacttcaatccttactcctgctcattaaaacttaatcaaacttcaaaaaaaaaaaa

SEQ ID NO: 180 - DNA, 1505 bp, Homo sapiens
  misc_feature: phospholipase A2, group VII (platelet-activating factor acetylhydrolase, plasma) /// phospholipase A2, group VII (platelet-activating factor acetylhydrolase, plasma)
gctggtcggaggctcgcagtgctgtcggcgagaagcagtcgggtttggagcgcttgggtcgcgttggtgcgcggtggaacgcgcccagggaccccagttcccgcgagcagctccgcgccgcgcctgagagactaagctgaaactgctgctcagctcccaagatggtgccacccaaattgcatgtgcttttctgcctctgcggctgcctggctgtggtttatccttttgactggcaatacataaatcctgttgcccatatgaaatcatcagcatgggtcaacaaaatacaagtactgatggctgctgcaagctttggccaaactaaaatcccccggggaaatgggccttattccgttggttgtacagacttaatgtttgatcacactaataagggcaccttcttgcgtttatattatccatcccaagataatgatcgccttgacaccctttggatcccaaataaagaatatttttggggtcttagcaaatttcttggaacacactggcttatgggcaacattttgaggttactctttggttcaatgacaactcctgcaaactggaattcccctctgaggcctggtgaaaaatatccacttgttgttttttctcatggtcttggggcattcaggacactttattctgctattggcattgacctggcatctcatgggtttatagttgctgctgtagaacacagagatagatctgcatctgcaacttactatttcaaggaccaatctgctgcagaaataggggacaagtcttggctctaccttagaaccctgaaacaagaggaggagacacatatacgaaatgagcaggtacggcaaagagcaaaagaatgttcccaagctctcagtctgattcttgacattgatcatggaaagccagtgaagaatgcattagatttaaagtttgatatggaacaactgaaggactctattgatagggaaaaaatagcagtaattggacattcttttggtggagcaacggttattcagactcttagtgaagatcagagattcagatgtggtattgccctggatgcatggatgtttccactgggtgatgaagtatattccagaattcctcagcccctcttttttatcaactctgaatatttccaatatcctgctaatatcataaaaatgaaaaaatgctactcacctgataaagaaagaaagatgattacaatcaggggttcagtccaccagaattttgctgacttcacttttgcaactggcaaaataattggacacatgctcaaattaaagggagacatagattcaaatgtagctattgatcttagcaacaaagcttcattagcattcttacaaaagcatttaggacttcataaagattttgatcagtgggactgcttgattgaaggagatgatgagaatcttattccagggaccaacattaacacaaccaatcaacacatcatgttacagaactcttcaggaatagagaaatacaattaggattaaaataggtttttt

SEQ ID NO: 181 - DNA, 1222 bp, Homo sapiens
  misc_feature: chemokine (C motif) ligand 1
agctcagcaggacctcagccatgagacttctcatcctggccctccttggcatctgctctctcactgcatacattgtggaaggtgtagggagtgaagtctcagataagaggacctgtgtgagcctcactacccagcgactgccggttagcagaatcaagacctacaccatcacggaaggctccttgagagcagtaatttttattaccaaacgtggcctaaaagtctgtgctgatccacaagccacatgggtgagagacgtggtcaggagcatggacaggaaatccaacaccagaaataacatgatccagaccaagccaacaggaacccagcaatcgaccaatacagctgtgactctgactggctagtagtctctggcaccctgtccgtctccagccagccagctcatttcactttacacgctcatggactgagtttatactcaccttttatgaaagcactgcatgaataaaattattcctttgtatttttacttttaaatgtcttctgtattcacttatatgttctaattaataaattatttattattaagaatagttccctagtctattcattatatttagggaaaggtagtgtatcattgttgtttgatttctgaccttgtacctctctttgatggtaaccataatggaagagattctggctagtgtctatcagaggtgaaagctatatcaatctctcttagagtccagcttgtaatggttctttacacatcagtcacaagttacagctgtgacaatggcaacaatttgagatgtatttcaacttgtctctataatagaattctgtttatagaataagggagaaaataatccagtcttcactgggttcccattctgagggtccactactcaaaaatttgcttcactcaatttttttcacctctttgtgttttattttggtgtcctattaaaggaataaaatgacacaacttgtcccttttttgtcccattagcaaaaattagaattttggtataaagaaactttattcaagtaaaaatcaataccctttgaattggacaataatctcactaccttattaggatttctgtatttgccattacgctagttatcatgcatgttatgctttactgcgaataagcttttaatgctccaaatgctgacccatgcaatatttcctcatgtgatcacaatttgcagtaaacttttaattaaatgctcatctggtaactcaacaccccag

SEQ ID NO: 182 - DNA, 5711 bp, Homo sapiens
  misc_feature: development and differentiation enhancing factor 2
cgcccctctccgcgggaggcgtcggggcccgcggctgggtggcgggtagttcccgccggctgtgcgcgcccgcctcggggctcgctctgagaggacgcggcggcagcggactcggagccctcggcgcgcaggcgggcggaccggccgagctgcgcggggctgcgcgccgcccctgctccgccgccaggccccgcgcggctcccgcgcccggcgctcccctttgtccgcgggccggagcggcggcggcagcggcggtgtccgagcggcggtcggagcctgctgcggcagttgaggcggcggcgcccctgcggctgtgcgccagcgccctcgcgccgaggcgatgccggaccagatctccgtgtcggaattcgtggccgagacccatgaggactacaaggcgcccacggcctccagcttcaccacccgcacggcgcagtgccggaacactgtggcggccatcgaggaggctttggacgtggaccggatggttctttacaaaatgaagaaatccgtgaaagcaatcaacagctctgggctggctcacgtggaaaatgaagagcagtacacccaggctctggagaagtttggcggcaactgtgtatgcagagatgacccagatttaggaagtgcgttcctgaagttctcagtgtttacaaaggagttgacagcacttttcaaaaacctgattcagaatatgaacaacataatctccttccctttggacagtttgctgaagggggacctgaaaggagtgaaaggggatctgaaaaagccttttgataaagcttggaaggactatgaaacaaaaataaccaagatagaaaaggagaaaaaggaacacgccaagctccatgggatgattcggactgaaataagcggagcggaaattgccgaagagatggaaaaggagaggcgcttcttccagctacagatgtgcgagtatctgctgaaggtcaacgaaatcaagattaaaaagggagtagatttacttcagaatctgatcaaatactttcatgcccaatgcaatttttttcaggatggactcaaagccgtggaaagcctcaaaccttccattgaaacgctgtctacggatcttcacacgatcaaacaggcccaggatgaagaaagaaggcagttgatacagcttcgagatattttgaaatccgcattgcaggttgaacagaaagaggactcccaaattcgtcagagcacagcttatagcttacatcagcctcagggaaacaaggaacatgggaccgagcggaacggcagcctctacaagaagagtgacgggatccgaaaagtgtggcagaaaaggaaatgttcagttaaaaatggttttctgaccatatcccatggtaccgctaaccggcctcctgcaaagctcaacctgctaacctgccaggtgaagaccaaccctgaggagaagaagtgctttgaccttatttcacatgacagaacttaccactttcaagctgaagatgaacaggaatgtcaaatatggatgtctgtgctgcaaaatagcaaagaagaagctttaaacaatgcatttaagggggatgacaatactggagaaaataacatcgtccaagaactgacaaaggagatcatctcagaagtgcagaggatgacgggcaatgacgtctgctgtgactgtggggcgccagatcctacatggctttccaccaacctgggcatcctgacctgcatcgagtgttccggaatccaccgagagctgggggttcattattccaggatgcagtccctgaccttagatgtactgggaacatctgagctgctgctcgccaagaatattgggaatgcaggctttaatgagatcatggaatgttgcctaccagctgaggactcagtcaaacccaacccaggcagcgacatgaatgcaagaaaggactacatcacagccaagtacatcgagaggagatacgcaaggaagaagcacgcggataacgcggcgaagcttcacagtctttgcgaggccgtcaaaacgagagatatttttggattgctccaagcttatgctgatggtgtggatcttacggaaaaaatcccactggccaacggacatgagccggatgaaacggccctccaccttgcagtcagatccgtggatcgaacctctcttcacattgtagactttttagttcagaacagtgggaacctggataaacagacagggaaaggcagcacagccctgcactactgctgcctgaccgacaatgccgagtgcctcaagttgctcctgcgggggaaggcctccatcgagatagcaaacgagtcaggagagactccgctggacattgccaagcgcctcaagcacgagcactgtgaggagctgctgacccaagccttatctggaagatttaattctcacgttcacgttgaatatgaatggcgactactccacgaagacctggatgaaagtgatgacgacatggatgagaaattgcagcccagtcccaaccggcgggaagaccggcccatcagcttctaccagctgggctccaaccagcttcagtctaacgctgtatctttggccagagatgctgcaaaccttgccaaggagaagcagagggctttcatgcccagcatcttgcagaatgagacttacggagccctcctgagtggcagcccacctcccgcccagcctgcagcccccagcaccaccagcgcccccccgcttcctccacggaatgttggcaaagttcagacagcctcctctgctaacaccctgtggaagacaaactctgtaagtgtggacggtggaagccggcagcgatcttcgtcagatccgccagctgtccatccaccgctgccccctcttcgcgtgacatctaccaatcccctgacccccacgccgcccccacccgttgccaagacgcccagcgtaatggaagccttgagccagccgagcaagcctgccccgcctgggatctcacagatcaggcccccacctctgcccccacagccgcccagccgcctcccgcagaagaagcctgcgccgggggctgacaagtccaccccactgaccaacaaaggccaaccgagaggacctgtggatctctctgcaacggaagctctgggtcctctgtccaatgctatggtcctgcagccccctgcacccatgcctaggaagtcgcaggcaaccaagttgaagcctaagcgggtgaaagcgctctataactgtgtggctgacaaccccgatgagctcaccttctccgagggggatgtgatcatcgtggacggggaggaggaccaggagtggtggattggccacattgatggagatcctggtcgcaaaggcgcattcccggtgtcatttgtgcactttatcgctgactgaattgctactgaacaaaagcattaacagttatgttcctgtttcgttattggtaccaaaactcttgccagataaccagtttcatgaactgtttgtatggcagcccatgttctctaatgccactgctctgttttaaaaactcagaggcaatttttacatatcagtaattgtttttataatttgtggttttcatgaaacattgctatgcatttattaggaaaaactgaatttcccaacaggtgaactgaaaagttattttaactattatacataatcaagatcctgcctctacggaattagctaaacctaaaaatgtttgcattaatgaataaattcttcctgcattccttggcccagttctggagttggtgacctttatcacaattattattttaggcggccagtgaactgctgcttcagaagtccatagcccagctctgaactttctcgataaaatgccatcagttcacctttaaagacacacattcctttgaaatccacccagtgtttaaaaagcaacttggaaatttacacattagcattgtactttctagccctaatttgtgaggttgcagctatcattatattctgcatgtatgtataacctgttgtgaacaatcatacttaacaaaactactgatggtttatgacaacgtagggtaactacagttcattctgttccaggttatataaaactgcatttcctgaatttggttaaaaactaaggatgatggattgcaaaacagttcttttaaattagtttatatgctttaggtgttttggaatttgccttcttgaacttcctgagtcacacagaaagcaactgtacacagtagaattctgtggcgcagaccatgctgtattaacacatcacttgctgtttcctactgagtgtaccactgccttcccttctagcccaggagaatgtttactcagtttagtgtcttgtatttctataatactccaacaggaatggtagtcacactgtcttgaaattgaatctgtccatctgtttataatcaagaacatatcagaaatatataggtcccaggtaatactcccaaacatcccactttttactgtttcaggccatcatatcattcttaagctacttggggtggtagtagaggattaggttgtctattataaaaccaaaactcattcgtttaatgaacttgactgtcatacctctatttagtaattgcgagggtaagattcatagtaggaatattggaaattttggcactctgagaataaataggcatatgatacccacttggacttttaacaaaagtaaaggaataaatttgcatataggcttggaaagtgaggcagcaatgctgttaactgcatttgttgtgatggtgcatttgattgaagcagcttgtctttattatgcaagactgtgtagagttttttttttttttggcattgtactttttgtttttgttataaaggaagacagaacaaactggaatgttttatgatgttgtatagcaatcgctttttacctttcaaagttccgggtaaaaatgtgttatatctgtagttttttgtttttgtttttttttaaagcactacatctgttttcactaattgttaatttctgtttgaacccttcatttaattttctcatagatttaagtaaacagatgtattttgcacagtgcacttatgtctattttaacaatcctcctgcatctgtattttatagtcagccttttgaccacctggtgccagctatataaggaataaagttgattcatatcaacattagaactccagtcccaaactaatctgtcaggttcactggtacataaatacctaggaaatatttttccagtctacaatttggtgctattgtgcagtaactaatagtactcttaccagaggagaaattatattaacgaccctgctaatatcctttcttagttatttgctccttgcaaattaaaaaagcaactaagagaaagaaaaacattgtagatatctatttatatttaaagtttatgtttcatgaactgcagctgcaggattctggcattttgcatgccattctccatcagatctgggatgatggctcagaacatgtacacagactaagagtaactgtgtgatctgttaaggggtggataacataatatgcagcttaggatgctattttgagatgtatgatattcagttcattcacctgattactttggttgcagcacaactgtatatattgtataaccgaaattgattattttcattgtccttaatgcagtgatttataattagagcatgtttaataagtttactcttcttgttaactagtcatttgactggaaaaaaataaaatacttttaaatgg

SEQ ID NO: 183 - DNA, 1019 bp, Homo sapiens
  misc_feature: immunoglobulin superfamily, member 6
  misc_feature (1013)..(1014): n is a, c, g, or t
ttcctttcaaatacacaccccaacccgccccggcatacacagaaatggggactgcgagcagaagcaacatcgctcgccatctgcaaaccaatctcattctattttgtgtcggtgctgtgggcgcctgtactctctctgtcacacaaccgtggtacctagaagtggactacactcatgaggccgtcaccataaagtgtaccttctccgcaaccggatgcccttctgagcaaccaacatgcctgtggtttcgctacggtgctcaccagcctgagaacctgtgcttggacgggtgcaaaagtgaggcagacaagttcacagtgagggaggccctcaaagaaaaccaagtttccctcactgtaaacagagtgacttcaaatgacagtgcaatttacatctgtggaatagcattccccagtgtgccggaagcgagagctaaacagacaggaggagggaccacactggtggtaagagaaattaagctgctcagcaaggaactgcggagcttcctgacagctcttgtatcactgctctctgtctatgtgaccggtgtgtgcgtggccttcatactcctctccaaatcaaaatccaaccctctaagaaagaaagaaataaaagaagactcacaaaagaagaagagtgctcggcgtatttttcaggaaattgctcaagaactataccataagagacatgtggaaacaaatcagcaatctgagaaagataacaacacttatgaaaacagaagagtactttccaactatgaaaggccatagaaacgttttaattttcaatgaagtcactgaaaatccaactccaggagctatggcagtgttaatgaacatatatcatcaggtcttaaaaaaaaaataaaggtaaactgaaaagacaactggctacaaagaaggatgtcagaatgtaaggaaactataactaatagtcattaccaaaatactaaaacccaacaaaatgcaactgaaaaataccttccaaatttgccaagaaaaaaaattctattnnaaact

SEQ ID NO: 184 - DNA, 367 bp, Homo sapiens
  misc_feature: metallothionein 1H
ctccagtctcacctcggcttgcaatggaccccaactgctcctgcgaggctggtggctcctgcgcctgcgccggctcctgcaagtgcaaaaagtgcaaatgcacctcctgcaagaagagctgctgctcctgttgccccctgggctgtgccaagtgtgcccagggctgcatctgcaaaggggcgtcagagaagtgcagctgctgtgcctgatgtcgggacagccctgctgtcagatgaaaacagaatgacacgtaaaatccgaggttttttttttctacaactccgactcatttgctacattcctttttttctgtgaaatatgtgaataataattaaacacttagacttgaaaaaaaaaaaaaaaaaaa

SEQ ID NO: 185 - DNA, 2424 bp, Homo sapiens
  misc_feature: chromosome condensation 1
ccagcccgggagcgcgccacatgcagatcctgggatggccgccaggggccgccgggctctttgttttcctttctcacccgggtcggggccagaggcctgcagagcgcatgctctggggcagttcgcggcccggcggggagcgccggagttccttgtggccgacgtgcaccaaggacaggaagatgtcacccaagcgcatagctaaaagaaggtcccccccagcagatgccatccccaaaagcaagaaggtgaaggtctcacacaggtcccacagcacagaacccggcttggtgctgacactaggccagggcgacgtgggccagctggggctgggtgagaatgtgatggagaggaagaagccggccctggtatccattccggaggatgttgtgcaggctgaggctgggggcatgcacaccgtgtgtctaagcaaaagtggccaggtctattccttcggctgcaatgatgagggtgccctgggaagggacacatcagtggagggctcggagatggtccctgggaaagtggagctgcaagagaaggtggtacaggtgtcagcaggagacagtcacacagcagccctcaccgatgatggccgtgtcttcctctggggctccttccgggacaataacggtgtgattggactgttggagcccatgaagaagagcatggtgcctgtgcaggtgcagctggatgtgcctgtggtaaaggtggcctcaggaaacgaccacttggtgatgctgacagctgatggtgacctctacaccttgggctgcggggaacagggccagctaggccgtgtgcctgagttatttgccaaccgtggtggccggcaaggcctcgaacgactcctggtccccaagtgtgtgatgctgaaatccaggggaagccggggccacgtgagattccaggatgccttttgtggtgcctatttcacctttgccatctcccatgagggccacgtgtacggcttcggcctctccaactaccatcagcttggaactccgggcacagaatcttgcttcataccccagaacctaacatccttcaagaattccaccaagtcctgggtgggcttctctggtggccagcaccatacagtctgcatggattcggaaggaaaagcatacagcctgggccgggctgagtatgggcggctgggccttggagagggtgctgaggagaagagcatacccaccctcatctccaggctgcctgctgtctcctcggtggcttgtggggcctctgtggggtatgctgtgaccaaggatggtcgtgttttcgcctggggcatgggcaccaactaccagctgggcacagggcaggatgaggacgcctggagccctgtggagatgatgggcaaacagctggagaaccgtgtggtcttatctgtgtccagcgggggccagcatacagtcttattagtcaaggacaaagaacagagctgatgaagcctctgagggcctggcttctgtcctgcacaacctccctcacagaacagggaagcagtgacagctgcagatggcagcgggcctctccccagccctgagcactgtgtcagttcctgccttttctcatcagcagaacagaatccttttcctcttttccttcctcctctttggaattttcctgggacctacagaataaagggggggatggacagggggttttcaaaaggaacatggctcactcagagctatatggttagacgtttctccccttttccctaccttccatggtcctggttggccctggctttgcctactagaaaaccaaaacttcccccctggggttttgtgcccactctctgagaagttggggctccatcaagccccattctagtcatgtgcccctttcctgtccctaacagtccacaggcaaacaaatggtacagtcataagagccatctgtcacggacccacgcccagaggaacgtgcagaaaaaagcagagctacatggctgtgggcaactataagccaaatatttggctcagaacaggtgtccatgggacaaaaaagaacgatcctccacttgaccaagaaaaaagtgattctcccagaagcacaaagcatactcttgcccctcaggtgttgcttgtgtacatcgtacccatccattcggcttcacctgcagccaacggcctggaatcgcaaagagacaccactctgggcagagcagagcagggtatggggtggggagagagggtggagggttttataaacaaacttaacagcaatattgaaaggaggtgggggattgagggagggacagagtgttggagggccagagactagtcctgagatggaaacagcaacttgtacagtggctgagaaaataggatatagttttgatttttttaattgtaaaatattttggagggagaacaaaatcttttaacattttgaataaatttagagttatat

SEQ ID NO: 186 - DNA, 1344 bp, Homo sapiens
  misc_feature: C-type lectin domain family 10, member A
ccaagaccagcaggactccagtcacctctaccccagctctccaggacacagcgctcccaactctgagtgacgtcccacctctggtccttgcagcacaaccaacgtgggaatcacaccctccagacctcccacagctccaccccagactgggcgccggccctgcctccatttcagctgtgacaacctcagagccgtgttggcccaagcatgacaaggacgtatgaaaacttccagtacttggagaataaggtgaaagtccaggggtttaaaaatgggccacttcctctccagtccctcctgcagcgtctccgctctgggccctgccatctcctgctgtccctgggcctcggcctgctgctgctggtcatcatctgtgtggttggattccaaaattccaaatttcagagggacctggtgaccctgagaacagattttagcaacttcacctcaaacactgtggcggagatccaggcactgacttcccagggcagcagcttggaagaaacgatagcatctctgaaagctgaggtggagggtttcaagcaggaacggcaggcagttcattctgaaatgctcctgcgagtccagcagctggtgcaagacctgaagaaactgacctgccaggtggctactctcaacaacaatggtgaggaagcctccactgaagggacctgctgccccgtcaactgggtggagcaccaagacagctgctactggttctctcactctgggatgtcctgggccgaggctgagaagtactgccagctgaagaacgcccacctggtggtcatcaactccagggaggagcagaattttgtccagaaatatctaggctccgcatacacctggatgggcctcagtgaccctgaaggagcctggaagtgggtggatggaacagactatgcgaccggcttccagaactggaagccaggccagccagacgactggcaggggcacgggctgggtggaggcgaggactgtgctcacttccatccagacggcaggtggaatgacgacgtctgccagaggccctaccactgggtctgcgaggctggcctgggtcagaccagccaggagagtcactgagctgcctttggtgggaccacccggccacagaaatggcggtgggaggaggactcttctcacgacctcctcgcaagaccgctctgggagagaaataagcactgggagattggaagcactgctaacattttgaatttttttctctttaattttaaaaagatggtatagtgttcttaagcttttattttttttccaacttttgaaagtcaacttcatgaaggtataatttttacataataaaaatgcactcatttaaagagt

SEQ ID NO: 187 - DNA, 1805 bp, Homo sapiens
  misc_feature: transcription factor EC
tgtttactttggttgtcccttctggcatggtgcatatgttatgggaagagggattataatttggtgctgtttgtagagatgacaacactgataaaatccactcattgctggtcccagcacacctggaaagttctgcaaggcctcagctacagaaagcccagagacagaaagtaaactctttcatgacccttgatcatcagatcatcaatccaactcttaaatggtcacaacctgcagtgccaagtggtgggcctcttgtgcagcatgcacacacaactctggacagtgatgctggcctcacagaaaacccactcaccaagttactagctattgggaaagaagatgacaatgcacaatggcatatggaggacgttattgaggatataatcggtatggaatcaagttttaaagaggaaggagcagactctcctctgctaatgcaaagaacattatctggaagtattttggatgtgtatagcggtgaacaaggaatttcaccaattaacatggggcttacaagtgcttcttgtccaagtagtctaccaatgaaaagagaaattacagaaactgacactagagctttagcaaaagagagacaaaaaaaggacaaccacaacctcattgaaagaagaagaaggtataatattaattaccgaatcaaggagcttggcactcttattccaaagtctaatgatcctgatatgcgctggaacaaaggaaccattctaaaagcatcagtggagtacatcaagtggctacaaaaagaacaacagagagcccgagaattggaacacagacagaagaaattagagcaggctaacaggcgacttctacttcggattcaggaactagaaattcaggctcgtactcatggtctgccaaccctggcttcacttggcacggttgatttaggtgctcatgtcaccaaacagcagagccatcctgagcagaattcagtagactattgccaacaactgactgtgtctcaggggccaagccctgagctctgtgatcaagctatagccttttctgatcctttgtcatacttcacagatttatcatttagtgctgcattgaaagaggaacaaagattggatggcatgctattggatgacacaatctctccatttggaacagatcctctgctatctgccacttcccctgcagtttccaaagaaagcagtaggagaagtagctttagctcagatgatggtgatgaattataagaaataaacagacccaattcatcaactggaaagcaattctatgctggtgctatgcaattatgctctgtgtttcatatgttgctttggcttattttttttcttaaaggaatgtgttgttcatgaaaaactgatagaagcaacagaagaattcgcaggaagaaaaatcatagtgttaatgaattattgagggcgaaaaaaaggtgttttcttctttgactacggagtccaaatccacttaaattctgttttcctgaaaagaggtacagcataagaaatagctctttattgatgttttaaaagcagcaacttggtggtgtactactggaactaatgactgcaaagtgttaaacgactgaaatatacaaacagtctcttagttactcatttccatcttctcttcaactttcacatcagtcttccggaatcaagatcaacatatcaggtggtcattgcctttctccattgtctagtagacatgtctaaagttcaaactttataggataaataaatgtataatagattatctgtcacttgtggttgaaaggcaaatctacaataaatgtgagaattttccacaat

SEQ ID NO: 188 - DNA, 1529 bp, Homo sapiens
  misc_feature: Fc fragment of IgE, low affinity II, receptor for (CD23A)
agtggctctactttcagaagaaagtgtctctcttcctgcttaaacctctgtctctgacggtccctgccaatcgctctggtcgaccccaacacactaggaggacagacacaggctccaaactccactaaccagagctgtgattgtgcccgctgagtggactgcgttgtcagggagtgagtgctccatcatcgggagaatccaagcaggaccgccatggaggaaggtcaatattcagagatcgaggagcttcccaggaggcggtgttgcaggcgtgggactcagatcgtgctgctggggctggtgaccgccgctctgtgggctgggctgctgactctgcttctcctgtggcactgggacaccacacagagtctaaaacagctggaagagagggctgcccggaacgtctctcaagtttccaagaacttggaaagccaccacggtgaccagatggcgcagaaatcccagtccacgcagatttcacaggaactggaggaacttcgagctgaacagcagagattgaaatctcaggacttggagctgtcctggaacctgaacgggcttcaagcagatctgagcagcttcaagtcccaggaattgaacgagaggaacgaagcttcagatttgctggaaagactccgggaggaggtgacaaagctaaggatggagttgcaggtgtccagcggctttgtgtgcaacacgtgccctgaaaagtggatcaacttccaacggaagtgctactacttcggcaagggcaccaagcagtgggtccacgcccggtatgcctgtgacgacatggaagggcagctggtcagcatccacagcccggaggagcaggacttcctgaccaagcatgccagccacaccggctcctggattggccttcggaacttggacctgaagggagagtttatctgggtggatgggagccatgtggactacagcaactgggctccaggggagcccaccagccggagccagggcgaggactgcgtgatgatgcggggctccggtcgctggaccgacgccttctgcgaccgtaagctgggcgcctgggtgtgcgaccggctggccacatgcacgccgccagccagcgaaggttccgcggagtccatgggacctgattcaagaccagaccctgacggccgcctgcccaccccctctgcccctctccactcttgagcatggatacagccaggcccagagcaagaccctgaagacccccaaccacggcctaaaagcctctttgtggctgaaaggtccctgtgacattttctgccacccaaacggaggcagctgacacatctcccgctcctctatggcccctgccttcccaggagtacaccccaacagcaccctctccagatgggagtgcccccaacagcaccctctccagatgagagttacaccccaacagcaccctctccagatgcagccccatctcctcagcaccccaggacctgagtatccccagctcagggtggtgagtcctcctgtccagcctgcatcaataaaatggggcagtgatggcc

SEQ ID NO: 189 - DNA, 2232 bp, Homo sapiens
  misc_feature: chemokine (C-C motif) receptor 2 /// chemokine (C-C motif) receptor 2
ggattgaacaaggacgcatttccccagtacatccacaacatgctgtccacatctcgttctcggtttatcagaaataccaacgagagcggtgaagaagtcaccaccttttttgattatgattacggtgctccctgtcataaatttgacgtgaagcaaattggggcccaactcctgcctccgctctactcgctggtgttcatctttggttttgtgggcaacatgctggtcgtcctcatcttaataaactgcaaaaagctgaagtgcttgactgacatttacctgctcaacctggccatctctgatctgctttttcttattactctcccattgtgggctcactctgctgcaaatgagtgggtctttgggaatgcaatgtgcaaattattcacagggctgtatcacatcggttattttggcggaatcttcttcatcatcctcctgacaatcgatagatacctggctattgtccatgctgtgtttgctttaaaagccaggacggtcacctttggggtggtgacaagtgtgatcacctggttggtggctgtgtttgcttctgtcccaggaatcatctttactaaatgccagaaagaagattctgtttatgtctgtggcccttattttccacgaggatggaataatttccacacaataatgaggaacattttggggctggtcctgccgctgctcatcatggtcatctgctactcgggaatcctgaaaaccctgcttcggtgtcgaaacgagaagaagaggcatagggcagtgagagtcatcttcaccatcatgattgtttactttctcttctggactccctataacattgtcattctcctgaacaccttccaggaattcttcggcctgagtaactgtgaaagcaccagtcaactggaccaagccacgcaggtgacagagactcttgggatgactcactgctgcatcaatcccatcatctatgccttcgttggggagaagttcagaagcctttttcacatagctcttggctgtaggattgccccactccaaaaaccagtgtgtggaggtccaggagtgagaccaggaaagaatgtgaaagtgactacacaaggactcctcgatggtcgtggaaaaggaaagtcaattggcagagcccctgaagccagtcttcaggacaaagaaggagcctagagacagaaatgacagatctctgctttggaaatcacacgtctggcttcacagatgtgtgattcacagtgtgaatcttggtgtctacgttaccaggcaggaaggctgagaggagagagactccagctgggttggaaaacagtattttccaaactaccttccagttcctcatttttgaatacaggcatagagttcagactttttttaaatagtaaaaataaaattaaagctgaaaactgcaacttgtaaatgtggtaaagagttagtttgagttgctatcatgtcaaacgtgaaaatgctgtattagtcacagagataattctagctttgagcttaagaattttgagcaggtggtatgtttgggagactgctgagtcaacccaatagttgttgattggcaggagttggaagtgtgtgatctgtgggcacattagcctatgtgcatgcagcatctaagtaatgatgtcgtttgaatcacagtatacgctccatcgctgtcatctcagctggatctccattctctcaggcttgctgccaaaagccttttgtgttttgttttgtatcattatgaagtcatgcgtttaatcacattcgagtgtttcagtgcttcgcagatgtccttgatgctcatattgttccctaatttgccagtgggaactcctaaatcaaattggcttctaatcaaagcttttaaaccctattggtaaagaatggaaggtggagaagctccctgaagtaagcaaagactttcctcttagtcgagccaagttaagaatgttcttatgttgcccagtgtgtttctgatctgatgcaagcaagaaacactgggcttctagaaccaggcaacttgggaactagactcccaagctggactatggctctactttcaggccacatggctaaagaaggtttcagaaagaagtggggacagagcagaactttcaccttcatatatttgtatgatcctaatgaatgcataaaatgttaagttgatggtgatgaaatgtaaatactgtttttaacaactatgatttggaaaataaatcaatgctataactatgttgataaaag

SEQ ID NO: 190 - DNA, 4040 bp, Homo sapiens
  misc_feature: interleukin 12 receptor, beta 2
tgcagagaacagagaaaggacatctgcgaggaaagttccctgatggctgtcaacaaagtgccacgtctctatggctgtgtacgctgagcacacgattttatcgcgcctatcatatcttggtgcataaacgcacctcacctcggtcaacccttgctccgtcttatgagacaggctttattatccgcattttatatgaggggaatctgacggtggagagagaattatcttgctcaaggcgacacagcagagcccacaggtggcagaatcccacccgagcccgcttcgacccgcggggtggaaaccacgggcgcccgcccggctgcgcttccagagctgaactgagaagcgagtcctctccgccctgcggccaccgcccagccccgacccccgccccggcccgatcctcactcgccgccagctccccgcgcccaccccggagttggtggcgcagaggcgggaggcggaggcgggagggcgggcgctggcaccgggaacgcccgagcgccggcagagagcgcggagagcgcgacacgtgcggcccagagcaccggggccacccggtccccgcaggcccgggaccgcgcccgctggcaggcgacacgtggaagaatacggagttctataccagagttgattgttgatggcacatacttttagaggatgctcattggcatttatgtttataatcacgtggctgttgattaaagcaaaaatagatgcgtgcaagagaggcgatgtgactgtgaagccttcccatgtaattttacttggatccactgtcaatattacatgctctttgaagcccagacaaggctgctttcactattccagacgtaacaagttaatcctgtacaagtttgacagaagaatcaattttcaccatggccactccctcaattctcaagtcacaggtcttccccttggtacaaccttgtttgtctgcaaactggcctgtatcaatagtgatgaaattcaaatatgtggagcagagatcttcgttggtgttgctccagaacagcctcaaaatttatcctgcatacagaagggagaacaggggactgtggcctgcacctgggaaagaggacgagacacccacttatacactgagtatactctacagctaagtggaccaaaaaatttaacctggcagaagcaatgtaaagacatttattgtgactatttggactttggaatcaacctcacccctgaatcacctgaatccaatttcacagccaaggttactgctgtcaatagtcttggaagctcctcttcacttccatccacattcacattcttggacatagtgaggcctcttcctccgtgggacattagaatcaaatttcaaaaggcttccgtgagcagatgtaccctttattggagagatgagggactggtactgcttaatcgactcagatatcggcccagtaacagcaggctctggaatatggttaatgttacaaaggccaaaggaagacatgatttgctggatctgaaaccatttacagaatatgaatttcagatttcctctaagctacatctttataagggaagttggagtgattggagtgaatcattgagagcacaaacaccagaagaagagcctactgggatgttagatgtctggtacatgaaacggcacattgactacagtagacaacagatttctcttttctggaagaatctgagtgtctcagaggcaagaggaaaaattctccactatcaggtgaccttgcaggagctgacaggagggaaagccatgacacagaacatcacaggacacacctcctggaccacagtcattcctagaaccggaaattgggctgtggctgtgtctgcagcaaattcaaaaggcagttctctgcccactcgtattaacataatgaacctgtgtgaggcagggttgctggctcctcgccaggtctctgcaaactcagagggcatggacaacattctggtgacttggcagcctcccaggaaagatccctctgctgttcaggagtacgtggtggaatggagagagctccatccagggggtgacacacaggtccctctaaactggctacggagtcgaccctacaatgtgtctgctctgatttcagagaacataaaatcctacatctgttatgaaatccgtgtgtatgcactctcaggggatcaaggaggatgcagctccatcctgggtaactctaagcacaaagcaccactgagtggcccccacattaatgccatcacagaggaaaaggggagcattttaatttcatggaacagcattccagtccaggagcaaatgggctgcctcctccattataggatatactggaaggaacgggactccaactcccagcctcagctctgtgaaattccctacagagtctcccaaaattcacatccaataaacagcctgcagccccgagtgacatatgtcctgtggatgacagctctgacagctgctggtgaaagttcccacggaaatgagagggaattttgtctgcaaggtaaagccaattggatggcgtttgtggcaccaagcatttgcattgctatcatcatggtgggcattttctcaacgcattacttccagcaaaaggtgtttgttctcctagcagccctcagacctcagtggtgtagcagagaaattccagatccagcaaatagcacttgcgctaagaaatatcccattgcagaggagaagacacagctgcccttggacaggctcctgatagactggcccacgcctgaagatcctgaaccgctggtcatcagtgaagtccttcatcaagtgaccccagttttcagacatcccccctgctccaactggccacaaagggaaaaaggaatccaaggtcatcaggcctctgagaaagacatgatgcacagtgcctcaagcccaccacctccaagagctctccaagctgagagcagacaactggtggatctgtacaaggtgctggagagcaggggctccgacccaaagccagaaaacccagcctgtccctggacggtgctcccagcaggtgaccttcccacccatgatggctacttaccctccaacatagatgacctcccctcacatgaggcacctctcgctgactctctggaagaactggagcctcagcacatctccctttctgttttcccctcaagttctcttcacccactcaccttctcctgtggtgataagctgactctggatcagttaaagatgaggtgtgactccctcatgctctgagtggtgaggcttcaagccttaaagtcagtgtgccctcaaccagcacagcctgccccaattcccccagcccctgctccagcagctgtcatctctgggtgccaccatcggtctggctgcagctagaggacaggcaagccagctctgggggagtcttaggaactgggagttggtcttcactcagatgcctcatcttgcctttcccagggccttaaaattacatccttcactgtgtggacctagagactccaacttgaattcctagtaactttcttggtatgctggccagaaagggaaatgaggaggagagtagaaaccacagctcttagtagtaatggcatacagtctagaggaccattcatgcaatgactatttctaaagcacctgctacacagcaggctgtacacagcagatcagtactgttcaacagaacttcctgagatgatggaaatgttctacctctgcactcactgtccagtacattagacactaggcacattggctgttaatcacttggaatgtgtttagcttgactgaggaattaaattttgattgtaaatttaaatcgccacacatggctagtggctactgtattggagtgcacagctctagatggctcctagattattgagagcctccaaaacaaatcaacctagttctatagatgaagacataaaagacactggtaaacaccaatgtaaaagggcccccaaggtggtcatgactggtctcatttgcagaagtctaagaatgtacctttttctggccgggcgtggtagctcatgcctgtaatcccagcactttgggaggctga

SEQ ID NO: 191 - DNA, 2211 bp, Homo sapiens
  misc_feature: solute carrier family 16 (monocarboxylic acid transporters), member 6
ttgggggtttattctcttcccttctaacttgacagggtcttgctctgtcattcaggcaagagtgcagtagtgtgatcacttcttactgccgcctcaagcttccagcctcaactcaagcaatcctcccacctcagccacccaagtggctgggactacagattaagaatgacccaaaataaattaaagctttgttccaaagccaatgtgtatactgaagtgcctgatggaggatggggctgggcggtagctgtttcatttttcttcgttgaagtcttcacctacggcatcatcaagacatttggtgtcttctttaatgacttaatggacagttttaatgaatccaatagcaggatctcatggataatctcaatctgtgtgtttgtcttaacattttcagctcccctcgccacagtcctgagcaatcgtttcggacaccgtctggtagtgatgttgggggggctacttgtcagcaccgggatggtggccgcctccttctcacaagaggtttctcatatgtacgtcgccatcggcatcatctctggtctgggatactgctttagttttctcccaactgtaaccatcctatcacaatattttggcaaaagacgttccatagtcactgcagttgcttccacaggagaatgtttcgctgtgtttgctttcgcaccagcaatcatggctctgaaggagcgcattggctggagatacagcctcctcttcgtgggcctactacagttaaacattgtcatcttcggagcactgctcagacccatcattatcagaggaccagcgtcaccgaaaatagtcatccaggaaaatcggaaagaagcgcagtatatgcttgaaaatgagaaaacacgaacctcaatagactccattgactcaggagtagaactaactacctcacctaaaaatgtgcctactcacactaacctggaactggagccgaaggccgacatgcagcaggtcctggtgaagaccagccccaggccaagcgaaaagaaagccccgctattagacttctccattttgaaagagaaaagttttatttgttatgcattatttggtctctttgcaacactgggattctttgcaccttccttgtacatcattcctctgggcattagtctgggcattgaccaggaccgcgctgcttttttattatctacgatggccattgcagaagttttcggaaggatcggagctggttttgtcctcaacagggagcccattcgtaagatttacattgagctcatctgcgtcatcttattgactgtgtctctgtttgcctttacttttgctactgaattctggggtctaatgtcatgcagcatattttttgggtttatggttggaacaataggaggactcacattccactgcttgctgaagatgatgtcgtgggcattgcagaagatgtcttctgcagctggggtctacatcttcattcagagcatagcaggactggctggaccgccccttgcaggtttgttggtggaccaaagtaagatctacagcagggccttctactcctgcgcagctggcatggccctggctgctgtgtgcctcgccctggtgagaccgtgtaagatgggactgtgccagcgtcatcactcaggtgaaacaaaggtagtgagccatcgtgggaagactttacaggacatacctgaagactttctggaaatggatcttgcaaaaaatgagcacagagttcacgtgcaaatggagccggtatgacacactttcttacaacaacagccactgtgttggctggagagggatggggtgggcccaacggggacacaaggaggcagaggagctaacccctctactccactttcaaaactacattttaaagggaatgtgtatgtgaagagcactaccaacatcgcttttgttttgttttgttttgttttaagctttttttttttgcttgtttttaaagccaaaacaaaaaacaaccaagcactcttccatatataaatctggctgtattcagtagcaatacaagagatatgtagaaagactctttggttcacattccgatattaaaatagtgacatgaactggcaaagtggttttaaaagctttcacgtgggataaatgattttctttttttcttttctttcttcctatggtcttgtctgaataaactactctcctgaataaaacaacatccaacccaggtcattgaaatgaaattggccagtc

SEQ ID NO: 192 - DNA, 2396 bp, Homo sapiens
  misc_feature: histidine decarboxylase
agtgcgcaggactggcaagagggaagccgggctgctccacgcctttcacgccttccacctcctgcgtgtccatctgtgagaaggagccagagcccaagggagatgatggagcctgaggagtacagagagagagggagagagatggtggattacatctgccagtacctgagcactgtgcgggagagacgtgtgacgccagacgtgcagcctggctacctgcgagcccagctgcctgagagtgctcctgaggaccccgacagctgggacagcatctttggggacattgaacgaatcatcatgcctggggtggtacattggcagagcccccatatgcacgcctactacccagccctcacctcttggccctccctgctaggagacatgctggctgatgccatcaactgcttgggattcacctgggcatccagccctgcgtgtacagagctggagatgaacgtcatggactggttggcaaaaatgctgggacttccagagcacttcttgcaccaccaccccagcagccagggcggaggcgtcctgcagcagacggtcagtgaatccactttgattgccctgctggcagcaaggaagaacaaaatcctggaaatgaaaacgtctgagcccgatgctgatgagtcctgcctaaatgcccgactcgtggcctatgcctctgaccaggctcactcctctgtggaaaaggctggtttgatttcccttgtgaagatgaaatttctgcctgtggatgacaacttctcactccgaggggaagctcttcagaaggccatcgaggaagacaagcagcggggcttggtgcccgtctttgtctgtgcaacactagggaccactggggtctgtgcatttgactgcctgtcagagctgggccccatctgtgcccgtgaggggctgtggctccacatcgatgctgcttatgcaggcactgccttcctgtgccccgagttccgggggtttctgaaggggattgagtatgccgactccttcacctttaatccttccaagtggatgatggtgcattttgactgtactgggttctgggtcaaggacaagtacaagctgcagcagaccttcagtgtgaatcccatctacctcaggcatgccaactcaggcgtggccaccgacttcatgcactggcagatccccctgagccgacggtttcgctctgttaaactctggttcgtgattcggtccttcggggtgaagaatcttcaagcacatgtcagacatggtactgaaatggctaaatattttgaatctctggtcagaaacgacccttcctttgaaattcctgccaagaggcaccttggcctggtggtttttcgtctaaagggtcctaattgtctcacagaaaatgtgttaaaggaaatagctaaagctggccgtctcttcctcatcccggccactatccaggacaagttaatcatccgtttcactgtgacatcccagtttaccactagggatgacatcctgagagactggaatctcattcgagatgctgccactctcatcctgagtcagcactgtacttcccaacccagccctcgggttgggaacctcatctcccaaatcaggggtgccagagcctgggcctgtggaacgtcccttcagtctgtcagtggggcaggagatgatccagtccaggccaggaagatcatcaagcagcctcagcgtgtgggagccggtcccatgaaaagggaaaatggcctccatcttgaaaccctgctggacccagttgatgactgcttttcagaagaggccccagatgccaccaagcacaagctgtcctccttcctgttcagttacttgtctgtgcagactaagaagaagacggtgcgctccctcagttgcaacagtgtgccagtgagtgctcagaagccactgcccacagaggcctctgtgaagaatgggggctcctccagggtcagaatcttttccaggtttccagaagacatgatgatgctgaagaaaagtgccttcaaaaaactcatcaaattctacagcgtccccagctttcctgaatgcagctctcaatgtggactccagctgccctgttgccctctgcaggccatggtttagacacagggccttcagcagagtctgaggatatacttcagggactctgtgaacccctcacaattgtatgccaactttgtgtgcttatgtgtacatgcatttttcttggggcgagttcataattttaatcaaattctcataggggctcatgacccacaataggatacaaacgaagagtttaagccagcatgatccagatgggttcatcagtctggtcagtgagaaagggccgagggtagacaggcagcttctgtggttcagcttgtgacatgatatataacacagaaataaattatgcttgtccctga

SEQ ID NO: 193 - DNA, 4266 bp, Homo sapiens
  misc_feature: CD209 antigen
tggggtgacatgagtgactccaaggaaccaagactgcagcagctgggcctcctggaggaggaacagctgagaggccttggattccgacagactcgaggatacaagagcttagcagggtgtcttggccatggtcccctggtgctgcaactcctctccttcacgctcttggctgggctccttgtccaagtgtccaaggtccccagctccataagtcaggaacaatccaggcaagacgcgatctaccagaacctgacccagcttaaagctgcagtgggtgagctctcagagaaatccaagctgcaggagatctaccaggagctgacccagctgaaggctgcagtgggtgagcttccagagaaatctaagctgcaggagatctaccaggagctgacccggctgaaggctgcagtgggtgagcttccagagaaatctaagctgcaggagatctaccaggagctgacctggctgaaggctgcagtgggtgagcttccagagaaatctaagatgcaggagatctaccaggagctgactcggctgaaggctgcagtgggtgagcttccagagaaatctaagcagcaggagatctaccaggagctgacccggctgaaggctgcagtgggtgagcttccagagaaatctaagcagcaggagatctaccaggagctgacccggctgaaggctgcagtgggtgagcttccagagaaatctaagcagcaggagatctaccaggagctgacccagctgaaggctgcagtggaacgcctgtgccacccctgtccctgggaatggacattcttccaaggaaactgttacttcatgtctaactcccagcggaactggcacgactccatcaccgcctgcaaagaagtgggggcccagctcgtcgtaatcaaaagtgctgaggagcagaacttcctacagctgcagtcttccagaagtaaccgcttcacctggatgggactttcagatctaaatcaggaaggcacgtggcaatgggtggacggctcacctctgttgcccagcttcaagcagtattggaacagaggagagcccaacaacgttggggaggaagactgcgcggaatttagtggcaatggctggaacgacgacaaatgtaatcttgccaaattctggatctgcaaaaagtccgcagcctcctgctccagggatgaagaacagtttctttctccagcccctgccaccccaaacccccctcctgcgtagcagaacttcacccccttttaagctacagttccttctctccatccttcgaccttcacaaaatctctgggactgttctttgtcagattcttcctcctttagaaggctgggtcccattctgtccttcttgtcatgcctccaatttcccctggtgtagagcttgtttttctggcccatccttggagctttatgagtgagctggtgtgggatgcctttgggggtggacttgtgttccaagaatccactctctcttccttttggagattaggatatttgggttgccatgtgtagctgctatgtcccctggggcgttatctcatacatgcaaacctaccatctgttcaacttccacctaccacctcctgcacccctttgatcggggacttactggttgcaagagctcattttgcaggctggaagcaccagggaattaattcccccagtctaccaatggcacccagagagggcatggaggctccacgcaaccccttccacccccacatcttcctttgtcttatacatggcttccatttggctgtttctaagttgtattctttattttattattattattactatttttcgagatggagtttcactcttgtcgctcaggctggagtgccatggcgcgatcttggctcactgcaacctctgcctcccgggttcaagtgattctcctgcctcagcctcacgagtagctggaattacaggcaggcgccaccaggcccggctaattttttgtatttttagtacagacggggtttctccgtgttggtcaggctggtcttgaactcccgacctcagatgatctgcccgcctcggcctcccaaaattgctgggattacaggtgtgagccaccgcgcctggcctattattttttgtaagaataaaacaggtttactgggatttgggactctgaacagttctgtctctactacctgatctcctcctaccacgactttgggatctagaggagctttggctccggctgtgacggctccggccgttctcactgcggctgcaccggcccccgctgcggtcactatttcttcctctgcttggtgaattgtgcctctcctggctctttgacatgtgctagtgagatttcttccttttcctttcggattccccatttcttttgtaggaatggtctggactagggttctccttccccgcagcctgtagtattcatcgtggtggcccatcctctctctccccttggagctcttgccaaaggaggagacaagcagaggtctctattggatttctcaacacctgaagaaagttgcagtgttttcctcttggacattgttgtatttcaaataaaccacaaatcatcattttccaccgagccactgggcagaattcacactgaagctgtcgtcctgcgtacataccatcgtccgttaaacagagaaagagctgcttggcattcttcttccgactggtactgaacatatatacttgcccctcaggtgaggttccaagttgcaactgaccttgaactgaatcactctccccacgttattttttaattactatttttttttaaagatggggtcttgctctgtcgccaggctggagtgcagtggcgcgatctaggctcactgcaacttccgcctcccgggttcaagcgattctcctgcctcagcctcccgagtagctgggactctactaaaagtacaaaaattagctggcgtgcaccaccgcgcccagctaattcttgtatttttggtagagacggggtttcaacatgttgaccaggatggtctcgatctcttgacctcgtgattcgcccgccgcgtcctcccaaagtgctgggattacaggcctgagccaccgcgcccagtctctccccacgttcttgaactcgggcagcacatcctcacagaaatctaggaactgttggtaggtttcttcctcgctgtactccaggcttgcttcggagtcatagtcatccctcctgcactgctcctttccaaacactgtaaacatgcttttaataagaagggtaggactggatgttgggaaatcatgtgaacatctatctccaaatctgcaagctcctgttttactgtagaagggacaattaactccatccttctccatgactctgaaatccaagggggggttccgggttttgccatgtggcgccattttccaactcattttcagcctgatccagcatcttctggacagcttccggtttttgtttcttctgtcgtttctgttcctcctcctctctctctttcctctgctgttcttcccattgttcctttaactttcgctcttgttcttgccgttttctagccacctcttccttttccttctttattctgaattcttcttgtgccttctgctctctcagcaaccactcctcatgtaatctttgcctctctcttccccatagcttttctagttgttgtttttcaataaaagtgtcctcctctttctgtgagagtcctgagtccctcagtggagcaagttcctgctggcgtttctttcgtttctccttcttcagggcggccctgtactttttgtggcttggtttctctggaaatgtcaccttttcgggcgcagccatcttgccggcaccgccccgcccctctagttgtatcctttataataaaatggtaaacattgtaaccgcagattcagcccaatctggttcaactttgtgtaataaaatggcgagttgtttttcagttgtcgtggacccccaggttgcaagttacataccctgggcatgtccagatgaacgaagcgtgcaaatccacgtggaacctaagtgctcagactgaggaacagggactgagttaagaagtggacaccacgtggcatgatccttgatccaatcagattgagccctggcgtgatccagtcagatcaagcctcctgaatcccctcattacaagatccaatcatatcatgcctcactaccctctgtatataaaatctgccccagcctccaacttggagagacagatttgggccagactcctgtgtccttgcttggctgccttgcaataaatttttctctctaca

SEQ ID NO: 194 - DNA, 2838 bp, Homo sapiens
  misc_feature: bombesin-like receptor 3
  misc_feature (2489)..(2489): n is a, c, g, or t
  misc_feature (2578)..(2578): n is a, c, g, or t
  misc_feature (2588)..(2588): n is a, c, g, or t
  misc_feature (2821)..(2821): n is a, c, g, or t
  misc_feature (2825)..(2825): n is a, c, g, or t
  misc_feature (2833)..(2833): n is a, c, g, or t
ctccacctcctactcttcagtgccagatgggtaagcatttagccaagcatgctgggagacacacagaactgaagcaaaggagtatctggatgtcttggattttcttcccattctgttctgttctgttctcctaataccatctcgttactagacgtaggcattggacgtgacaatcaactgcatttgaactgagaagaagaaatattaaagacacagtcttcagaagaaatggctcaaaggcagcctcactcacctaatcagactttaatttcaatcacaaatgacacagaatcatcaagctctgtggtttctaacgataacacaaataaaggatggagcggggacaactctccaggaatagaagcattgtgtgccatctatattacttatgctgtgatcatttcagtgggcatccttggaaatgctattctcatcaaagtctttttcaagaccaaatccatgcaaacagttccaaatattttcatcaccagcctggcttttggagatcttttacttctgctaacttgtgtgccagtggatgcaactcactaccttgcagaaggatggctgttcggaagaattggttgtaaggtgctctctttcatccggctcacttctgttggtgtgtcagtgttcacattaacaattctcagcgctgacagatacaaggcagttgtgaagccacttgagcgacagccctccaatgccatcctgaagacttgtgtaaaagctggctgcgtctggatcgtgtctatgatatttgctctacctgaggctatattttcaaatgtatacacttttcgagatcccaataaaaatatgacatttgaatcatgtacctcttatcctgtctctaagaagctcttgcaagaaatacattctctgctgtgcttcttagtgttctacattattccactctctattatctctgtctactattccttgattgctaggaccctttacaaaagcaccctgaacatacctactgaggaacaaagccatgcccgtaagcagattgaatcccgaaagagaattgccagaacggtattggtgttggtggctctgtttgccctctgctggttgccaaatcacctcctgtacctctaccattcattcacttctcaaacctatgtagacccctctgccatgcatttcattttcaccattttctctcgggttttggctttcagcaattcttgcgtaaacccctttgctctctactggctgagcaaaagcttccagaagcattttaaagctcagttgttctgttgcaaggcggagcggcctgagcctcctgttgctgacacctctcttaccaccctggctgtgatgggaacggtcccgggcactgggagcatacagatgtctgaaattagtgtgacctcgttcactgggtgtagtgtgaagcaggcagaggacagattctagcttttcaaggaaaaatgctgcttctcctcccagcgtgtgtatccgactctaagctgtgtgcaggtgtatggtgtccagatttttgttgtttgaaaagtgtgttgaaatcttaggagtgaaggatccctataagtaagtaaaatacaaaccattactttcttcaaagtacaaatagtaatgtcatcgggctttctaaataaaatgaagccccactaagtgcagaaagacaagtttatatatgccagtgaatcgtaagggaagtcaaatgggaaggaaggtgtaataaacaagatgaaacttaaaaatctcatttgttgtttaatcacatctgtgatgcttctaactcctcatatactgtgatttgcataaaattgtgtttgtgtttactgtgtggtgtaaatctagagatactttgtatgtgaaaaggggatcacaaaagagagaaagcatctcttaggctattttcttaaaaataaaccttcacagaatggctgtccttttccattaatctgtattccattgtagctgaatctgtgcagttgaaatgaaaatgttttggagtcagcgaatataaagcactgagtaaggatctggggcacagtgcttgccttactgggtcaacacttacaactgccatggattaataactgggctaagttatcattcacaaatattgttaggaacttgccttattcataggcagaataagtggtcatgtttatggtgtcatttgaggacctctgttgaaaaatctgcaaacctgccacagtgtctgaaattcttcctttacagaaattcgtttctttctggtaagcagtgccctctttctaaaaacatgcagaagtaccatatgaaatccctaacccctgggtgtgcaattgtgatcagatcatcttcctgcttgactttattaaacccaatgggtgcctaagtcctgtaagtgtatggcctaattaatctctgcccatggaaatcagatggaaagttctgattttctatcctgtgctcctacctgctaacatcattcacttgttaataattattgttttaaaaaaaaaaanctcttgtcaatagacgtgtcagatttagacctgtggtttcagaaaaatttttggagcaaatttaaacatgtttggcactataggtaaantttgtatttnaaaaaaaaaaacaatgtttgagtgtgcttttggtaatgctgagctttctttaaatggcttgtggagtcgtgaacttttgctaatgatgtggctccaaaaggtaatacatattaacattagactttaactttctgtaaaattggtttacttaaagttgggcggggggtgtgatactgtattagtattgttttaaagtggacactgtaacacgtgtggaaaaacaaataaatatnaaanaaagtttnaaaaa

SEQ ID NO: 195 - DNA, 1147 bp, Homo sapiens
  misc_feature: chromodomain helicase DNA binding protein 1-like
ggctactagccgcgggggccaagcccctggcttcttactgcggcttcatactgagggccgagccgaggcggcgcgggtgcaggagcaggacttacggcatgggggctgacagggattcacctacgctcttaccagctggagggagtaactggctcgcccagcgcttccattgtcagaatggctgtatcctgggagatgagatgggcctggggaagacctgccagactattgctctcttcatttatttggcaggaagattaaatgatgaagggccatttctgattctttgtccctatgtctgttttgagcaactggaaagaagaaatgcagagatttgctccaggtctttcctgtgtaacatatgcagcgacaaggaggaaagagcctgccttcagcaagacctgaaacaggagtcacgttttcatgtgctactgactacctatgagatttgcttgaaagatgcatcatttctaaaatcattcccttggagtgttcttgttgtggatgaagctcacaggttgaaaaaccaaagctccctgctgcataagaccttgtcagagttctcagtagtcttcagtctcctgttgaccggaactcccatccagaacagcctccaagagctctactccctcctcagttttgtggagcctgatctcttttccaaggaagagtgggagattttattcaacgctaccaggatattgagaaagaatctgagtcagcaagtgaactgcacaaactcttgcagccatttctgctgagcgagtgaaagctgaggtagctacagagcttcccaagaagacagaagtagtgatataccatggcatgtccgcattgcagaagaaatactacaaggccattttgatgaaagacctagatgcatttgaaaatgagacggcaaagaaagttaaactacagaacattttgtcccagcttcgaaagtgtgtggatcacccatatttgtttgatggtgtggagccggagccttttgaagttggagaccacctgactgaggctagtgggaagcttcacctgctggataagctactagcattcctgtattctgggggccatcgggttttacttttctcccaaatgacccagatgttggatattctccaagactatatggattacagaggctacg

SEQ ID NO: 196 - DNA, 1064 bp, Homo sapiens
  misc_feature: chemokine (C-X-C motif) ligand 3
  misc_feature (27)..(27): n is a, c, g, or t
  misc_feature (766)..(766): n is a, c, g, or t
cacagccgggtcgcaggcacctccccngccagctctcccgcattctgcacagcttcccgacgcgtctgctgagccccatggcccacgccacgctctccgccgcccccagcaatccccggctcctgcgggtggcgctgctgctcctgctcctggtgggcagccggcgcgcagcaggagcgtccgtggtcactgaactgcgctgccagtgcttgcagacactgcagggaattcacctcaagaacatccaaagtgtgaatgtaaggtcccccggaccccactgcgcccaaaccgaagtcatagccacactcaagaatgggaagaaagcttgtctcaaccccgcatcccccatggttcagaaaatcatcgaaaagatactgaacaaggggagcaccaactgacaggagagaagtaagaagcttatcagcgtatcattgacacttcctgcagggtggtccctgcccttaccagagctgaaaatgaaaaagagaacagcagctttctagggacagctggaaagggacttaatgtgtttgactatttcttacgagggttctacttatttatgtatttatttttgaaagcttgtattttaatattttacatgctgttatttaaagatgtgagtgtgtttcatcaaacatagctcagtcctgattatttaattggaatatgatgggttttaaatgtgtcattaaactaatatttagtgggagaccataatgtgtcagccaccttgataaatgacagggtggggaactggagggtngggggattgaaatgcaagcaattagtggatcactgttagggtaagggaatgtatgtacacatctattttttatacttttttttttaaaaaagaatgtcagttgttatttattcaaattatctcacattatgtgttcaacatttttatgctgaagtttcccttagacattttatgtcttgcttgtagggcataatgccttgtttaatgtccattctgcagcgtttctctttcccttggaaaagagaatttatcattactgttacatttgtacaaatgacatgataataaaagttttatg

SEQ ID NO: 197 - DNA, 1696 bp, Homo sapiens
  misc_feature: leukocyte immunoglobulin-like receptor, subfamily A (with TM domain), member 2 /// leukocyte immunoglobulin-like receptor, subfamily A (with TM domain), member 2
ccgagtgtccacaccctgtgcgtctctctgtcctgccagcactgagggctcatccatccgcagagcagggcagtgggaggagacgccatgacccccatcctcacggtcctgatctgtctcgggctgagtctgggccccaggacccacgtgcaggcagggcacctccccaagcccaccctctgggctgagccaggctctgtgatcatccagggaagtcctgtgaccctcaggtgtcaggggagccttcaggctgaggagtaccatctatatagggaaaacaaatcagcatcctgggttagacggatacaagagcctgggaagaatggccagttccccatcccatccatcacctgggaacacgcagggcggtatcactgtcagtactacagccacaatcactcatcagagtacagtgaccccctggagctggtggtgacaggagcctacagcaaacccaccctctcagctctgcccagccctgtggtgaccttaggagggaacgtgaccctccagtgtgtctcacaggtggcatttgacggcttcattctgtgtaaggaaggagaagatgaacacccacaacgcctgaactcccattcccatgcccgtgggtggtcctgggccatcttctccgtgggccccgtgagcccgagtcgcaggtggtcgtacaggtgctatgcttatgactcgaactctccctatgtgtggtctctacccagtgatctcctggagctcctggtcccaggtgtttctaagaagccatcactctcagtgcagccaggtcctatggtggcccctggggagagcctgaccctccagtgtgtctctgatgtcggctacgacagatttgttctgtataaggagggagaacgtgacttcctccagcgccctggttggcagccccaggctgggctctcccaggccaacttcaccctgggccctgtgagcccctcccacgggggccagtacagatgctacagtgcacacaacctctcctccgagtggtcggcccccagtgaccccctggacatcctgatcacaggacagttctatgacagaccctctctctcggtgcagccggtccccacagtagccccaggaaagaacgtgaccctgctgtgtcagtcacgggggcagttccacactttccttctgaccaaggagggggcaggccatcccccactgcatctgagatcagagcaccaagctcagcagaaccaggctgaattccgcatgggtcctgtgacctcagcccacgtggggacctacagatgctacagctcactcagctccaacccctacctgctgtctctccccagtgaccccctggagctcgtggtctcagcatccctaggccaacacccccaggattacacagtggagaatctcatccgcatgggtgtggctggcttggtcctggtggtcctcgggattctgctatttgaggctcagcacagccagagaagcctacaagatgcagccgggaggtgaacagcagagaggacaatgcatacttcagcgtggtggagcctcagggacagatctgatgatcccaggaggctctggaggacaatctaggacctacattatctggactgtatgctggtcatttctagagacagcaatcaatatttgagtgtaaggaaactgtctggggtgattcctagaagatcattaaactgtggtacatttttttgtc

SEQ ID NO: 198 - DNA, 673 bp, Homo sapiens
  misc_feature: interleukin 3 (colony-stimulating factor, multiple
gatccaaacatgagccgcctgcccgtcctgctcctgctccaactcctggtccgccccggactccaagctcccatgacccagacaacgtccttgaagacaagctgggttaactgctctaacatgatcgatgaaattataacacacttaaagcagccacctttgcctttgctggacttcaacaacctcaatggggaagaccaagacattctgatggaaaataaccttcgaaggccaaacctggaggcattcaacagggctgtcaagagtttacagaacgcatcagcaattgagagcattcttaaaaatctcctgccatgtctgcccctggccacggccgcacccacgcgacatccaatccatatcaaggacggtgactggaatgaattccggaggaaactgacgttctatctgaaaacccttgagaatgcgcaggctcaacagacgactttgagcctcgcgatcttttagtccaacgtccagctcgttctctgggccttctcaccacagcgcctcgggacatcaaaaacagcagaacttctgaaacctctgggtcatctctcacacattccaggaccagaagcatttcaccttttcctgcggcatcagatgaattgttaattatctaatttctgaaatgtgcagctcccatttggccttgtgcggttgtgttctc

SEQ ID NO: 199 - DNA, 2015 bp, Homo sapiens
  misc_feature: hemopoietic cell kinase
cggaggcacggaagatgaggaagatgatcaggaggatgatgaaggtgaagagggagatgaagacgatgacgacgatggctctgaggggacctcaggggctgccgagctgggggggcgctcaagctgcgaggatccgggctgcccgcgagacgaggagcgggcgccaggatggggtcgatgaagtccaagttcctccaggtcggaggcaatacattctcaaaaactgaaaccagcgccagcccacactgtcctgtgtacgtgccggatcccacatccaccatcaagccggggcctaatagccacaacagcaacacaccaggaatcagggaggcaggctctgaggacatcatcgtggttgccctgtatgattacgaggccattcaccacgaagacctcagcttccagaagggggaccagatggtggtcctagaggaatccggggagtggtggaaggctcgatccctggccacccggaaggagggctacatcccaagcaactatgtcgcccgcgttgactctctggagacagaggagtggtttttcaagggcatcagccggaaggacgcagagcgccaactgctggctcccggcaacatgctgggctccttcatgatccgggatagcgagaccactaaaggaagctactctttgtccgtgcgagactacgaccctcggcagggagataccgtgaaacattacaagatccggaccctggacaacgggggcttctacatatccccccgaagcaccttcagcactctgcaggagctggtggaccactacaagaaggggaacgacgggctctgccagaaactgtcggtgccctgcatgtcttccaagccccagaagccttgggagaaagatgcctgggagatccctcgggaatccctcaagctggagaagaaacttggagctgggcagtttggggaagtctggatggccacctacaacaagcacaccaaggtggcagtgaagacgatgaagccagggagcatgtcggtggaggccttcctggcagaggccaacgtgatgaaaactctgcagcatgacaagctggtcaaacttcatgcggtggtcaccaaggagcccatctacatcatcacggagttcatggccaaaggaagcttgctggactttctgaaaagtgatgagggcagcaagcagccattgccaaaactcattgacttctcagcccagattgcagaaggcatggccttcatcgagcagaggaactacatccaccgagacctccgagctgccaacatcttggtctctgcatccctggtgtgtaagattgctgactttggcctggcccgggtcattgaggacaacgagtacacggctcgggaaggggccaagttccccatcaagtggacagctcctgaagccatcaactttggctccttcaccatcaagtcagacgtctggtcctttggtatcctgctgatggagatcgtcacctacggccggatcccttacccagggatgtcaaaccctgaagtgatccgagctctggagcgtggataccggatgcctcgcccagagaactgcccagaggagctctacaacatcatgatgcgctgctggaaaaaccgtccggaggagcggccgaccttcgaatacatccagagtgtgctggatgacttctacacggccacagagagccagtaccaacagcagccatgatagggaggaccagggcagggcagggggtgcccaggtggtggctcgaaggtggctccagcaccatccgccagggcccacacccccttcctactcccagacacccaccctcgcttcagccacagtttcctcatctgtccagtgggtaggttggactggaaaatctctttttgactcttgcaatccacaatctgacattctcaggaagcccccaagttgatatttctatttcctggaatggttggattttagttacagctgtgatttggaagggaaactttcaaaatagtgaaatgaatatttaaataaaagatataaatgcaagtcttacg

SEQ ID NO: 200 - DNA, 810 bp, Homo sapiens
  misc_feature: chemokine (C-C motif) ligand 7 /// chemokine (C-C motif) ligand 7
agcagaggggctgagaccaaaccagaaacctccaattctcatgtggaagcccatgccctcaccctccaacatgaaagcctctgcagcacttctgtgtctgctgctcacagcagctgctttcagcccccaggggcttgctcagccagttgggattaatacttcaactacctgctgctacagatttatcaataagaaaatccctaagcagaggctggagagctacagaaggaccaccagtagccactgtccccgggaagctgtaatcttcaagaccaaactggacaaggagatctgtgctgaccccacacagaagtgggtccaggactttatgaagcacctggacaagaaaacccaaactccaaagctttgaacattcatgactgaactaaaaacaagccatgacttgagaaacaaataatttgtataccctgtcctttctcagagtggttctgagattattttaatctaattctaaggaatatgagctttatgtaataatgtgaatcatggtttttcttagtagattttaaaagttattaatattttaatttaatcttccatggattttggtgggttttgaacataaagccttggatgtatatgtcatctcagtgctgtaaaaactgtgggatgctcctcccttctctacctcatgggggtattgtataagtccttgcaagaatcagtgcaaagatttgctttaattgttaagatatgatgtccctatggaagcatattgttattatataattacatatttgcatatgtatgactcccaaattttcacataaaatagatttttgtaaaaaa

SEQ ID NO: 201 - DNA, 2033 bp, Homo sapiens
  misc_feature: serine/threonine kinase 6
gaattccgggactgagctcttgaagacttgggtccttggtcgcaggtggagcgacgggtctcactccattgcccaggccagagtgcgggatatttgataagaaacttcagtgaaggccgggcgcggtgctcatgcccgtaatcccagcattttcggaggccgaggcatcatggaccgatctaaagaaaactgcatttcaggacctgttaaggctacagctccagttggaggtccaaaacgtgttctcgtgactcagcaatttccttgtcagaatccattacctgtaaatagtggccaggctcagcgggtcttgtgtccttcaaattcttcccagcgcgttcctttgcaagcacaaaagcttgtctccagtcacaagccggttcagaatcagaagcagaagcaattgcaggcaaccagtgtacctcatcctgtctccaggccactgaataacacccaaaagagcaagcagcccctgccatcgcacctgaaaataatcctgaggaggaactggcatcaaaacagaaaaatgaagaatcaaaaagaggcagtggctttggaagactttgaaattggtcgccctctgggtaaaggaaagtttggtaatgtttatttggcaagagaaaagcaaagcaagtttattctggctcttaaagtgttatttaaagctcagctggagaaagccggagtggagcatcagctcagaagagaagtagaaatacagtcccaccttcggcatcctaatattcttagactgtatggttatttccatgatgctaccagagtctacctaattctggaatatgcaccacttggaacagtttatagagaacttcagaaactttcaaagtttgatgagcagagaactgctaacttatataacagaattgcaaatgccctgtcttactgtcattcgaagagagttattcatagagacattaagccagagaacttacttcttggatcagctggagagcttaaaattgcagattttgggtggtcagtacatgctccatcttccaggaggaccactctctgtggcaccctggactacctgccccctgaaatgattgaaggtcggatgcatgatgagaaggtggatctctggagccttggagttctttgctatgaatttttagttgggaagcctccttttgaggcaaacacataccaagagacctacaaaagaatatcacgggttgaattcacattccctgactttgtaacagagggagccagggacctcatttcaagactgttgaagcataatcccagccagaggccaatgctcagagaagtacttgaacacccctggatcacagcaaattcatcaaaaccatcaaattgccaaaacaaagaatcagctagcaaacagtcttaggaatcgtgcagggggagaaatccttgagccagggctgccatataacctgacaggaacatgctactgaagtttattttaccattgactgctgccctcaatctagaacgctacacaagaaatattttgtttttactcagcaggtgtgccttaacctccctattcagaaagctccacatcaataaacatgacactctgaagtgaaagtagccacgagaattgtgctacttatactggaacataatctggaggcaaggttcgactgcagtcgaaccttgcctccagattatgaaccagtataagtagcacaattctcgtggctactttcacttcagagtgtcatgtttattgatgtggagctttctgaatagggaggttaaggcacacctgctgagtaaaacaaatatttcttgtgtagcgttcttaggaatctggtgtctgtccggccccggtaggcctgttgggtttctagtcctccttaccatcatctccatatgagagtgtgaaaataggaacacgtgctctacctccatttagggatttgcttgggatacagaagaggccatgtgtctcagagctgttaagggcttatttttttaaaacattggagtcatagcatgtgtgtaaactttaaatatgcaggccttcgtggctcgag

SEQ ID NO: 202 - DNA, 2716 bp, Homo sapiens
  misc_feature: exonuclease NEF-sp /// exonuclease NEF-sp
aggctgaggggcggttgttgttggcagctgtggctaaggaggggagaacctctgctccccgcccgtcttctcttctgcgtttcccgggctagggggcgtggggagtggttttaggcggcgaagccgctcggcagcaccttccttctttgccaggcagacgcccgttgtagccgttggggaaccgttgagaatccgccatggagccagagagggaagggaccgagagacaccccaggaaggtcagggaaggcaggcaggccccaaataagctggtcggggcagctgaggcgatgaaagccggttgggatctcgaggagagtcagcccgaggccaagaaagcccgcttatctaccattttatttactgacaactgtgaagtaacccatgaccagctgtgtgaattgctgaagtatgcagttctgggcaaatccaatgttccaaaacccagctggtgccagctttttcatcaaaaccacctaaacaacgtagtggtttttgttctgcagggaatgagtcagctacacttttacaggttctatttggagtttggatgtcttcgaaaagcattcagacataaattccgcttgcctccaccatcatctgattttctagctgatgttgttgggctacaaactgaacaaagagctggagatctgcccaagacaatggaagggcctttaccttctaatgcaaaagccgccatcaaccttcaggatgatcccatcattcaaaagtatggctctaagaaagtgggcttgaccagatgccttctgacaaaggaggaaatgagaacgtttcactttccattacaaggttttcctgattgtgaaaactttttacttaccaaatgtaatggttctatagcagacaatagtcctctctttggacttgactgtgaaatgtgcctcacatccaaggggagagagctaacacgcatctcactggttgctgaaggaggctgctgtgttatggatgaactggtcaaacctgaaaacaagattctggactacctcaccagcttttcgggaatcacgaagaagattcttaacccagtgacgaccaaactcaaagatgtacagaggcagttaaaagcactgcttcctcctgatgctgtgttagtgggccactccttagatttggatctcagagcactgaaaatgatacatccatatgttattgatacatcgttgctttatgtcagagagcagggcagaagatttaagctcaagttcttagccaaagttattttggggaaggatatacagtgtccagacagacttggtcatgatgccacagaagatgctagaacaatccttgaattggctcggtatttccttaagcatggcccaaaaaagattgcagaactaaatctagaagcactagctaatcaccaagaaatacaagcagcaggccaagagcctaaaaacacagcagaagtacttcagcacccaaacacaagtgttttagaatgcttggattcagtgggtcagaagcttctttttttgacccgggagacagatgctggtgaacttccatcttccagaaattgtcaaactattaagtgtctttcaaataaagaggttcttgagcaggccagagtggaaatccccctgtttcccttcagcattgttcagttctcttttaaggccttttcacctgtcctcactgaggagatgaacaaaaggatgaggatcaagtggacagagatatcaactgtctatgctgggccatttagcaaaaattgcaatctcagggctctgaagaggctgtttaaaagctttggcccagtccagtcaatgacttttgttcttgaaacccgtcagcctcatctctgtatacagtatgaagtcctagaagctgcccagctggccatagagtccttggatggtattctggtagatggtatctgcatcaaggtgcagaggcctgtgacagagctcacgcttgattgtgacaccctcgtgaatgagctggaaggagattctgaaaaccaaggctctatatatctgtctggagtgagtgaaaccttcaaagaacagctattgcaggagccccgcctctttcttggcctggaagctgtgatcttgcctaaagatcttaaaagtggaaagcagaaaaaatactgtttcctgaaattcaaaagttttggcagtgcccagcaggccctcaacattctcacaggcaaggactggaagctgaaaggcaggcatgccctaacccccaggcacctccatgcctggctcagaggcttaccacctgaatcaacaaggctcccagggcttcgtgttgtacctcccccctttgaacaggaggccttgcagactctgaaactggaccacccgaagatagcagcctggcgctggagccggaagattggaaagctctacaacagcttgtgcccgggcactctctgcctcatcctgctgccaggaaccaagagcactcatggttcactctctggtctaggactgatgggaataaaagaggaagaagaaagcgctggcccaggcctgtgttcgtgagtcggcctgccatgtttccatgtgccatttcttaccccttgtaggcaatggcaaagaatgtggtcaggctgtagcctccccaaccagcagacagttttatggaaacttggtatagcagctaaaagagtttagtttgtttatatggcatgtataagttttcaataaatgcctaaagttcaagcataaaaaaaaaa

SEQ ID NO: 203 - DNA, 591 bp, Homo sapiens
  misc_feature: interleukin 9
ccgctgtcaagatgcttctggccatggtccttacctctgccctgctcctgtgctccgtggcaggccaggggtgtccaaccttggcggggatcctggacatcaacttcctcatcaacaagatgcaggaagatccagcttccaagtgccactgcagtgctaatgtgaccagttgtctctgtttgggcattccctctgacaactgcaccagaccatgcttcagtgagagactgtctcagatgaccaataccaccatgcaaacaagatacccactgattttcagtcgggtgaaaaaatcagttgaagtactaaagaacaacaagtgtccatatttttcctgtgaacagccatgcaaccaaaccacggcaggcaacgcgctgacatttctgaagagtcttctggaaattttccagaaagaaaagatgagagggatgagaggcaagatatgaagatgaaatattatttatcctatttattaaatttaaaaagctttctctttaagttgctacaatttaaaaatcaagtaagctactctaaatcagtatcagttgtgattatttgtttaacattgtatgtctttattttgaaataaat

SEQ ID NO: 204 - DNA, 1909 bp, Homo sapiens
  misc_feature: cytokine receptor-like factor 2
aaaaaatcgatggtgacctctgcttatgagtcatgagtgatctgttcgttgtaggtccctgaggacctcactctccactcctgtttcaggcatggggcggctggttctgctgtggggagctgccgtctttctgctgggaggctggatggctttggggcaaggaggagcagaaggagtacagattcagatcatctacttcaatttagaaaccgtgcaggtgacatggaatgccagcaaatactccaggaccaacctgactttccactacagattcaacggtgatgaggcctatgaccagtgcaccaactaccttctccaggaaggtcacacttcggggtgcctcctagacgcagagcagcgagacgacattctctatttctccatcaggaatgggacgcaccccgttttcaccgcaagtcgctggatggtttattacctgaaacccagttccccgaagcacgtgagattttcgtggcatcaggatgcagtgacggtgacgtgttctgacctgtcctacggggatctcctctatgaggttcagtaccggagccccttcgacaccgagtggcagacacagtcccgctctgtcacccaggctggagtgcagtggtgcgatctctgcttgctacaaccttcgcctcccaggttcaagcgattctcctgcctcagcctcccaagtagctgggattacaggcacccgccaccacgcctggctaatttttgtattatcagtagagacggggtttctccatgttggccaggctggtctcgaacttgcgacctcaggtgatccacccgcctcagcctcccaaagcgttgggtttacaggagtgagccactgtgtccggcctcgcggctccattcttgaagtcagcgagactgtgaaccctccggaaggaaaactctggacagacagatgcctgtgcagagacaccaacgcctcccaaaccaaagctgtccaaatttattttaatttccagcctggccatccttctgatggtgtctctcctccttctgtctttatggaaattatggagagtgaggaagtttctcattcccagcgtgccagacccgaaatccatcttccccgggctctttgagatacaccaagggaacttccaggagtggatcacagacacccagaacgtggcccacctccacaagatggcaggtgcagagcaagaaagtggccccgaggagcccctggtagtccagttggccaagactgaagccgagtctcccaggatgctggacccacagaccgaggagaaagaggcctctgggggatccctccagcttccccaccagcccctccaaggtggtgatgtggtcacaatcgggggcttcacctttgtgatgaatgaccgctcctacgtggcgttgtgatggacacaccactgtcaaagtcaacgtcaggatccacgttgacatttaaagacagaggggactgtccccgggactccacaccaccatggatgggaagtctccacgccaatgatggtaggactaggagactctgaagacccagcctcaccgcctaatgcggccactgccctgctaactttcccccacatgagtctctgtgttcaaaggcttgatggcagatgggagccaattgctccaggagatttactcccagttccttttcgtgcctgaacgttgtcacataaaccccaaggcagcacgtccaaaatgctgtaaaaccatcttcccactctgtgagtccccagttccgtccatgtaccattcccatagcattggattctcggaggattttttgtctgttttgagacggagtctcactctgttgcccaggctggactgcagtgagccaagatcgtgccgctgcactccaacctgggcaacagagcaagactccatctcaaaaaaaaaaaaaaaaaaaaaaaaa

SEQ ID NO: 205 - DNA, 2513 bp, Homo sapiens
  misc_feature: ST3 beta-galactoside alpha-2,3-sialyltransferase 1
gtcactcagcctatggagatgaagaaactgaggttcagagaggttaagagactccactgaggtcacacagccgatgacagacaaccttctgtgccttcatcaagctggttgtgtacccaccatgtccctggcgacaggattgggaaagaaaaagccctaattaaggatcgtcagaaaccacagttggaggaggacggcagagacagtttccctccccgctataccaacacccttccttcgaggtcctcgctcctgagggaccctggactgtcacagagattaatgaccccttattttctttggatgtgaaaggaaatcactggttaaagcttgatcgagagacattatcagctctttaaggattgcaggagaataggctactttattttctgaaaaggtaaatatatgcaagcaaagccaacatgccacgaatggcgttggtctaccacacagccgtgtctgggacacagttgggggtcatcccccagcaggagtgaagtcgagcttagcggcccttgtgtcctcccttggaattcctgccatcccttttgattgagcctccacctctgggatttttcttccatttttctcctctcttaggagggagttcctgctacccatcgtgggaggccaccatcaggactgcgaagatggtgaccctgcggaagaggaccctgaaagtgctcaccttcctcgtgctcttcatcttcctcacctccttcttcctgaactactcccacaccatggtggccaccacctggttccccaagcagatggtcctggagctctccgagaacctgaagagactgatcaagcacaggccttgcacctgcacccactgcatcgggcagcgcaagctctcggcctggttcgatgagaggttcaaccagaccatgcagccgctgctgactgcccagaacgcgctcttggaggacgacacctaccgatggtggctgaggctccagcgggagaagaagcccaataacttgaatgacaccatcaaggagctgttcagagtggtgcctgggaatgtggaccctatgctggagaagaggtcggtgggctgccggcgctgcgctgtggtgggcaactcgggcaacctgagggagtcttcttatgggcctgagatagacagtcacgactttgtcctcaggatgaacaaggcgcccacggcagggtttgaagctgatgttgggaccaagaccacccaccatctggtgtaccctgagagcttccgggagctgggagataatgtcagcatgatcctggtgcccttcaagaccatcgacttggagtgggtggtgagcgccatcaccacgggcaccatttcccacacctacatcccggttcctgcaaagatcagagtgaaacaggataagatcctgatctaccacccagccttcatcaagtatgtctttgacaactggctgcaagggcacgggcgatacccatctaccggcatcctctcggtcatcttctcaatgcatgtctgcgatgaggtggacttgtacggcttcggggcagacagcaaagggaactggcaccactactgggagaacaacccatccgcgggggcttttcgcaagacgggggtgcacgatgcagactttgagtctaacgtgacggccaccttggcctccatcaataaaatccggatcttcaaggggagatgacgcagtgaagggctgaggatggacgcactgtcacacctctgcatttccagccccagcatcttgctggagccgttccatcccggagcttggaggggcagcctcaggtgtgtgcctgggcaccgctcacagcctcttgcacccagccgttgacagcatctactcagcaaggtcactaagctctgccagcgtggcagagcatgtcttggaacctgtcttgagtgggacaacgtccccccactgctgccctagagctggggagacgctcagggaaaggttcaacctccacacactaaaatcatttgctcctgggcaagcttgggaatgaatgtggaagatcctatattctgagagacaggacagtttcccaggaagatgggcagagacttgagtggcgattacctccagcacagagacgtgccaggcggtgttggcgctcggggcgagatgctgcccttcttttgcacgaagcctggcctcttgcttggcgtgataaccctgtcatcttcccaaagctcatttatgagccaccagaggctcctaccccaaagatttcacagaaacttgaggccaggtgccgtggctcacacctgtaatctgaacactttgggaggccgaggcgggaggatcacttgagcccaggagttcaagaccagcctgggcaacatagtgagactcctgtctctacaaaaataaaagatttaaaaaaattagccaggcacggtggcacacacttgtagccccagctactagggaggctgaggagggaggatctcttgtgcctaggagttcgaggctgcagtgggctgtgatcacaccactgcactccagcctgggaacaag

SEQ ID NO: 206 - DNA, 429 bp, Homo sapiens
  misc_feature: lectin, galactoside-binding, soluble, 2 (galectin 2) /// lectin, galactoside-binding, soluble, 2 (galectin 2)
gggagctgccgccaggagctgtcaccatgacgggggaacttgaggttaagaacatggacatgaagccggggtcaaccctgaagatcacaggcagcatcgccgatggcactgatggctttgtaattaatctgggccaggggacagacaagctgaacctgcatttcaaccctcgcttcagcgaatccaccattgtctgcaactcattggacggcagcaactgggggcaagaacaacgggaagatcacctgtgcttcagcccagggtcagaggtcaagttcacagtgacctttgagagtgacaaattcaaggtgaagctgccagatgggcacgagctgacttttcccaacaggctgggtcacagccacctgagctacctgagcgtaaggggcgggttcaacatgtcctctttcaagttaaaagaataaaaga

SEQ ID NO: 207 - DNA, 1536 bp, Homo sapiens
  misc_feature: amylase, alpha 2A; pancreatic
  misc_feature (1101)..(1101): n is a, c, g, or t
atgaagctcttttggttgcttttcaccattgggttctgctgggctcagtattcctcaaatacacaacaaggacgaacatctattgttcatctgtttgaatggcgatgggttgatattgctcttgaatgtgagcgatatttagctcccaagggatttggaggggttcaggtctctccaccaaatgaaaatgttgccattcacaaccctttcagaccttggtgggaaagataccaaccagttagctataaattatgcacaagatctggaaatgaagatgaatttagaaacatggtgactagatgcaacaatgttggggttcgtatttatgtggatgctgtaattaatcatatgtgtggtaatgctgtgagtgcaggaacaagcagtacctgtggaagttacttcaaccctggaagtagggactttccagcagtcccatattctggatgggattttaatgatggtaaatgtaaaactggaagtggagatatcgagaactataatgatgctactcaggtcagagattgtcgtctgtctggtcttctcgatcttgcactggggaaggattatgtgcgttctaagattgccgaatatatgaaccatctcattgacattggtgttgcagggttcagaattgatgcttccaagcacatgtggcctggagacataaaggcaattttggacaaactgcataatctaaacagtaactggttcccggaaggtagtaaacctttcatttaccaggaggtaattgatctgggtggtgagccaattaaaagcagtgactactttggtaatggccgggtgacagaattcaagtatggtgcaaaactcggcacagttattcgcaagtggaatggagagaagatgtcttacttaaagaactggggagaaggttggggtttcatgccttctgacagagcgcttgtctttgtggataaccatgacaatcaacgaggacatggcgctggaggagcctctatacttaccttctgggatgctaggctgtacaaaatggcagttggatttatgcttgctcatccttatggatttacacgagtaatgtcaagctaccgttggccaagatattttgaaaatggaaangatgttaatgattgggttgggccaccaaatgataatggagtaactaaagaagttactattaatccagacactacttgtggcaatgactgggtctgtgaacatcgatggcgccaaataaggaacatggttaatttccgcaatgtagtggatggccagccttttacaaactggtatgataatgggagcaaccaagtggcttttgggagaggaaacagaggattcattgttttcaacaatgatgactggacattttctttaactttgcaaactggtcttcctgctggcacatactgtgatgtcatttctggagataaaattaatggcaactgcacaggcattaaaatctacgtttctgatgatggcaaagctcatttttctattagtaactctgctgaagatccatttattgcaattcatgctgaatctaaattgtaa

SEQ ID NO: 208 - DNA, 257 bp, Homo sapiens
  misc_feature: metallothionein 1X
accacgcttttcatctgtcccgctgcgtgttttcctcttgatcgggaactcctgcttctccttgcctcgaaatggaccccaactgctcctgctcgcctgttggctcctgtgcctgtgccggctcctgcaaatgcaaagagtgcaaatgcacctcctgcaagaagagctgctgctcctgctgccctgtcggctgtgccaagtgtgcccagggctgcatctgcaaagggacgtcagacaagtgcagctgctgtgcctga

SEQ ID NO: 209 - DNA, 1717 bp, Homo sapiens
  misc_feature: splicing factor, arginine/serine-rich 1 (splicing factor 2, alternate splicing factor)
cgccgcgggagacgtggtgccgctgcgggctcgctctgccgtgcgctaggcttggtgggaaggcctgttctcgagtccgcacttttcgtcaccgccatgtcgggaggtggtgtgattcgtggccccgcagggaacaacgattgccgcatctacgtgggtaacttacctccagacatccgaaccaaggacattgaggacgtgttctacaaatacggcgctatccgcgacatcgacctcaagaatcgccgcgggggaccgcccttcgccttcgttgagttcgaggacccgcgagacgcagaggacgcggtgtatggtcgcgacggctatgattacgatgggtaccgtctgcgggtggagtttcctcgaagcggccgtggaacaggccgaggcggcggcgggggtggaggtggcggagctccccgaggtcgctatggccccccatccaggcggtctgaaaacagagtggttgtctctggactgcctccaagtggaagttggcaggatttaaaggatcacatgcgtgaagcaggtgatgtatgttatgctgatgtttaccgagatggcactggtgtcgtggagtttgtacggaaagaagatatgacctatgcagttcgaaaactggataacactaagtttagatctcatgaggtaggttatacacgtattcttttctttgaccagaattggatacagtggtcttaacagtggaatttcaaggtaaggattcaggcaaggttgtcaagtaaattgccagatttctggttttagttacattgtattacttacgcatgtctgaagatagatgaaagcttagatctttcaatggaaagttctgtctatccaatagggagaaactgcctacatccgggttaaagttgatgggcccagaagtccaagttatggaagatctcgatctcgaagccgtagtcgtagcagaagccgtagcagaagcaacagcaggagtcgcagttactccccaaggagaagcagaggatcaccacgctattctccccgtcatagcagatctcgctctcgtacataagatgattggtgacactttttgtagaacccatgttgtatacagttttcctttattcagtacaatcttttcattttttaattcaaactgttttgttcagaatgggctaaagtgttgaattgcattcttgtaatatccccttgctcctaacatctacattcccttcgtgtctttgataaattgtattttaagtgatgtcatagacaggattgtttaaatttagttaactccatactcttcagactgtgatattgtgtaaatgtctatctgccctggtttgtgtgaactgggatgttggggtgtttgtggttatcttacctgggaagttcttagtttatcttgcttttcatgtgtctttctgtagacatatctgaagagatggattaagaatgctttggattaaggattgtggagcacatttcaatcattttaggattgtcaaaaggaggattgaggaggatcagatcaataatggaggcaatggtttggattggagagggctcactggatcccaatccttggagctggatcattggattcaaatcataatgtggataggatagggaggatgaattaccaggattcatggagcgggatcagattaccaggaacataggagtggattcctgccccaaccaaaccgcattcgtgtggatttttttattcaacttaattggc

SEQ ID NO: 210 - DNA, 2710 bp, Homo sapiens
  misc_feature: dual specificity phosphatase 6
cttggagggagggattagaagccgctagactttttttcctcccctctcagtagcacggagtccgaattaattggatttcattcactggggaggaacaaaaactatctgggcagcttcattgagagagattcattgacactaagagccagcggctgcagctgggtgcagagagaacctccggctttacttctgtctcgtctgccccaaccgctagcctcggcttgggtaaggcgaggcggaattaaaccccgctccgagagcggcagcttcgcgcgcggtgcgctcggcctatgcctgccccgaggggcgtctggtaggcaccccgccctctcccgcagctcgacccccatgatagatacgctcagacccgtgcccttcgcgtcggaaatggcgatcagcaagacggtggcgtggctcaacgagcagctggagctgggcaacgagcggctgctgctgatggactgccggccgcaggagctatacgagtcgtcgcacatcgagtcggccatcaacgtggccatcccgggcatcatgctgcggcgcctgcagaagggtaacctgccggtgcgcgcgctcttcacgcgcggcgaggaccgggaccgcttcacccggcgctgtggcaccgacacagtggtgctctacgacgagagcagcagcgactggaacgagaatacgggcggcgagtcgttgctcgggctgctgctcaagaagctcaaggacgagggctgccgggcgttctacctggaaggtggcttcagtaagttccaagccgagttctccctgcattgcgagaccaatctagacggctcgtgtagcagcagctcgccgccgttgccagtgctggggctcgggggcctgcggatcagctctgactcttcctcggacatcgagtctgaccttgaccgagaccccaatagtgcaacagactcggatggtagtccgctgtccaacagccagccttccttcccagtggagatcttgcccttcctctacttgggctgtgccaaagactccaccaacttggacgtgttggaggaattcggcatcaagtacatcttgaacgtcacccccaatttgccgaatctctttgagaacgcaggagagtttaaatacaagcaaatccccatctcggatcactggagccaaaacctgtcccagtttttccctgaggccatttctttcatagatgaagcccggggcaagaactgtggtgtcttggtacattgcttggctggcattagccgctcagtcactgtgactgtggcttaccttatgcagaagctcaatctgtcgatgaacgatgcctatgacattgtcaaaatgaaaaaatccaacatatcccctaacttcaacttcatgggtcagctgctggacttcgagaggacgctgggactcagcagcccatgtgacaacagggttccagcacagcagctgtattttaccaccccttccaaccagaatgtataccaggtggactctctgcaatctacgtgaaagaccccacatccctccttgctggaatgtgtctggcccttcagcagtttctcttggcagcatcagctgggctgctttctttgtgtgtggccccaggtgtcaaaatgacaccagctgtctgtactagacaaggttaccaagtgcggaattggttaatactaacagagagatttgctccattctctttggaataacaggacatgctgtatagatacaggcagtaggtttgctctgtacccatgtgtacagcctacccatgcagggactgggattcgaggacttccaggcgcatagggtagaaccaaatgatagggtaggagcatgtgttctttagggccttgtaaggctgtttccttttgcatctggaactgactatataattgtcttcaatgaagactaattcaattttgcatatagaggagccaaagagagatttcagctctgtatttgtggtatcagtttggaaaaaaaaatctgatactccatttgattattgtaaatatttgatcttgaatcacttgacagtgtttgtttgaattgtgtttgttttttcctttgatgggcttaaaagaaattatccaaagggagaaagagcagtatgccacttcttaaaacagaacaaaacaaaaaaagaaaattgtgctcttttctaatccaaagggtatatttgcagcatgcttgactttaccaattctgatgacatctttacggacactattatcactaagaccttgttatggcgaagtctttagtctttttcatgtattttcctcatgattttttctctttatgtagtttgactatgccttacctttgtaaatatttttgcttgtgttgtcgcaaaggggataatctgggaaagacaccaaatcatgggctcactttaaaaaaagaaagaataaaaaaaccttcagctgtgctaaacagtatattacctctgtataaaattcttcagggagtgtcacctcaaatgcaatactttgggttggtttctttcctttaaaaaaatttgtataaaactggaagtgtgtgtgtgtgagcatgggtacccatttgataagagaaatgcatttgattgtgaagaagggagagttaaattctccattatgttcgtggtgtaaagtttagagctggaatttattataagaatgtaaaaccttaaattattaataaataactattttggctattgaaaaaaaaaaaaaaaaaaaaaaaa

SEQ ID NO: 211 - DNA, 10211 bp, Homo sapiens
  misc_feature: centromere protein F, 350/400ka (mitosin) /// centromere protein F, 350/400ka (mitosin)
gagaggtcgttttcccgtccccgagagcaagtttatttacaaatgttggagtaataaagaaggcagaacaaaatgagctgggctttggaagaatggaaagaagggctgcctacaagagctcttcagaaaattcaagagcttgaaggacagcttgacaaactgaagaaggaaaagcagcaaaggcagtttcagcttgacagtctcgaggctgcgcctcagaagcaaacacagaaggttgaaaatgaaaaaaccgagggtacaaacctgaaaagggagaatcaaagattgatggaaatatgtgaaagtctggagaaaactaagcagaagatttctcatgaacttcaagtcaaggagtcacaagtgaatttccaggaaggacaactgaattcaggcaaaaaacaaatagaaaaactggaacaggaacttaaaaggtgtaaatctgagcttgaaagaagccaacaagctgcgcagtctgcagatgtctctctgaatccatgcaatacaccacaaaaaatttttacaactccactaacaccaagtcaatattatagtggttccaagtatgaagatctaaaagaaaaatataataaagaggttgaagaacgaaaaagattagaggcagaggttaaagccttgcaggctaaaaaagcaagccagactcttccacaagccaccatgaatcaccgcgacattgcccggcatcaggcttcatcatctgtgttctcatggcagcaagagaagaccccaagtcatctttcatctaattctcaaagaactccaattaggagagatttctctgcatcttacttttctggggaacaagaggtgactccaagtcgatcaactttgcaaatagggaaaagagatgctaatagcagtttctttgacaattctagcagtcctcatcttttggatcaattaaaagcgcagaatcaagagctaagaaacaagattaatgagttggaactacgcctgcaaggacatgaaaaagaaatgaaaggccaagtgaataagtttcaagaactccaactccaactggagaaagcaaaagtggaattaattgaaaaagagaaagttttgaacaaatgtagggatgaactagtgagaacaacagcacaatacgaccaggcgtcaaccaagtatactgcattggaacaaaaactgaaaaaattgacggaagatttgagttgtcagcgacaaaatgcagaaagtgccagatgttctctggaacagaaaattaaggaaaaagaaaaggagtttcaagaggagctctcccgtcaacagcgttctttccaaacactggaccaggagtgcatccagatgaaggccagactcacccaggagttacagcaagccaagaatatgcacaacgtcctgcaggctgaactggataaactcacatcagtaaagcaacagctagaaaacaatttggaagagtttaagcaaaagttgtgcagagctgaacaggcgttccaggcgagtcagatcaaggagaatgagctgaggagaagcatggaggaaatgaagaaggaaaacaacctccttaagagtcactctgagcaaaaggccagagaagtctgccacctggaggcagaactcaagaacatcaaacagtgtttaaatcagagccagaattttgcagaagaaatgaaagcgaagaatacctctcaggaaaccatgttaagagatcttcaagaaaaaataaatcagcaagaaaactccttgactttagaaaaactgaagcttgctgtggctgatctggaaaagcagcgagattgttctcaagaccttttgaagaaaagagaacatcacattgaacaacttaatgataagttaagcaagacagagaaagagtccaaagccttgctgagtgctttagagttaaaaaagaaagaatatgaattgaaagaagagaaaactctgttttcttgttggaaaagtgaaaacgaaaaacttttaactcagatggaatcagaaaaggaaaacttgcagagtaaaattaatcacttggaaacttgtctgaagacacagcaaataaaaagtcatgaatacaacgagagagtaagaacgctggagatggacagagaaaacctaagtgtcgagatcagaaaccttcacaacgtgttagacagtaagtcagtggaggtagagacccagaaactagcttatatggagctacagcagaaagctgagttctcagatcagaaacatcagaaggaaatagaaaatatgtgtttgaagacttctcagcttactgggcaagttgaagatctagaacacaagcttcagttactgtcaaatgaaataatggacaaagaccggtgttaccaagacttgcatgccgaatatgagagcctcagggatctgctaaaatccaaagatgcttctctggtgacaaatgaagatcatcagagaagtcttttggcttttgatcagcagcctgccatgcatcattcctttgcaaatataattggagaacaaggaagcatgccttcagagaggagtgaatgtcgtttagaagcagaccaaagtccgaaaaattctgccatcctacaaaatagagttgattcacttgaattttcattagagtctcaaaaacagatgaactcagacctgcaaaagcagtgtgaagagttggtgcaaatcaaaggagaaatagaagaaaatctcatgaaagcagaacagatgcatcaaagttttgtggctgaaacaagtcagcgcattagtaagttacaggaagacacttctgctcaccagaatgttgttgctgaaaccttaagtgcccttgagaacaaggaaaaagagctgcaacttttaaatgataaggtagaaactgagcaggcagagattcaagaattaaaaaagagcaaccatctacttgaagactctctaaaggagctacaacttttatccgaaaccctaagcttggagaagaaagaaatgagttccatcatttctctaaataaaagggaaattgaagagctgacccaagagaatgggactcttaaggaaattaatgcatccttaaatcaagagaagatgaacttaatccagaaaagtgagagttttgcaaactatatagatgaaagggagaaaagcatttcagagttatctgatcagtacaagcaagaaaaacttattttactacaaagatgtgaagaaaccggaaatgcatatgaggatcttagtcaaaaatacaaagcagcacaggaaaagaattctaaattagaatgcttgctaaatgaatgcactagtctttgtgaaaataggaaaaatgagttggaacagctaaaggaagcatttgcaaaggaacaccaagaattcttaacaaaattagcatttgctgaagaaagaaatcagaatctgatgctagagttggagacagtgcagcaagctctgagatctgagatgacagataaccaaaacaattctaagagcgaggctggtggtttaaagcaagaaatcatgactttaaaggaagaacaaaacaaaatgcaaaaggaagttaatgacttattacaagagaatgaacagctgatgaaggtaatgaagactaaacatgaatgtcaaaatctagaatcagaaccaattaggaactctgtgaaagaaagagagagtgagagaaatcaatgtaattttaaacctcagatggatcttgaagttaaagaaatttctctagatagttataatgcgcagttggtgcaattagaagctatgctaagaaataaggaattaaaacttcaggaaagtgagaaggagaaggagtgcctgcagcatgaattacagacaattagaggagatcttgaaaccagcaatttgcaagacatgcagtcacaagaaattagtggccttaaagactgtgaaatagatgcggaagaaaagtatatttcagggcctcatgagttgtcaacaagtcaaaacgacaatgcacaccttcagtgctctctgcaaacaacaatgaacaagctgaatgagctagagaaaatatgtgaaatactgcaggctgaaaagtatgaactcgtaactgagctgaatgattcaaggtcagaatgtatcacagcaactaggaaaatggcagaagaggtagggaaactactaaatgaagttaaaatattaaatgatgacagtggtcttctccatggtgagttagtggaagacataccaggaggtgaatttggtgaacaaccaaatgaacagcaccctgtgtctttggctccattggacgagagtaattcctacgagcacttgacattgtcagacaaagaagttcaaatgcactttgccgaattgcaagagaaattcttatctttacaaagtgaacacaaaattttacatgatcagcactgtcagatgagctctaaaatgtcagagctgcagacctatgttgactcattaaaggccgaaaatttggtcttgtcaacgaatctgagaaactttcaaggtgacttggtgaaggagatgcagctgggcttggaggaggggctcgttccatccctgtcatcctcttgtgtgcctgacagctctagtcttagcagtttgggagactcctccttttacagagctcttttagaacagacaggagatatgtctcttttgagtaatttagaaggggctgtttcagcaaaccagtgcagtgtagatgaagtattttgcagcagtctgcaggaggagaatctgaccaggaaagaaaccccttcggccccagcgaagggtgttgaagagcttgagtccctctgtgaggtgtaccggcagtccctcgagaagctagaagagaaaatggaaagtcaagggattatgaaaaataaggaaattcaagagctcgagcagttattaagttctgaaaggcaagagcttgactgccttaggaagcagtatttgtcagaaaatgaacagtggcaacagaagctgacaagcgtgactctggagatggagtccaagttggcggcagaaaagaaacagacggaacaactgtcacttgagctggaagtagcacgactccagctacaaggtctggacttaagttctcggtctttgcttggcatcgacacagaagatgctattcaaggccgaaatgagagctgtgacatatcaaaagaacatacttcagaaactacagaaagaacaccaaagcatgatgttcatcagatttgtgataaagatgctcagcaggacctcaatctagacattgagaaaataactgagactggtgcattgaaacccacaggagagtgctctggggaacagtccccagataccaattatgagcctccaggggaagataaaacccagggctcttcagaatgcatttctgaattgtcattttctggtcctaatgctttggtacctatggatttcctggggaatcaggaagatatccataatcttcaactgcgggtaaaagagacatcaaatgagaatttgagattacttcatgtgatagaggaccgtgacagaaaagttgaaagtttgctaaatgaaatgaaagaattagactcaaaactccatttacaggaggtacaactaatgaccaaaattgaagcatgcatagaattggaaaaaatagttggggaacttaagaaagaaaactcagatttaagtgaaaaattggaatatttttcttgtgatcaccaggagttactccagagagtagaaacttctgaaggcctcaattctgatttagaaatgcatgcagataaatcatcacgtgaagatattggagataatgtggccaaggtgaatgacagctggaaggagagatttcttgatgtggaaaatgagctgagtaggatcagatcggagaaagctagcattgagcatgaagccctctacctggaggctgacttagaggtagttcaaacagagaagctatgtttagaaaaagacaatgaaaataagcagaaggttattgtctgccttgaagaagaactctcagtggtcacaagtgagagaaaccagcttcgtggagaattagatactatgtcaaaaaaaaccacggcactggatcagttgtctgaaaaaatgaaggagaaaacacaagagcttgagtctcatcaaagtgagtgtctccattgcattcaggtggcagaggcagaggtgaaggaaaagacggaactccttcagactttgtcctctgatgtgagtgagctgttaaaagacaaaactcatctccaggaaaagctgcagagtttggaaaaggactcacaggcactgtctttgacaaaatgtgagctggaaaaccaaattgcacaactgaataaagagaaagaattgcttgtcaaggaatctgaaagcctgcaggccagactgagtgaatcagattatgaaaagctgaatgtctccaaggccttggaggccgcactggtggagaaaggtgagttcgcattgaggctgagctcaacacaggaggaagtgcatcagctgagaagaggcatcgagaaactgagagttcgcattgaggccgatgaaaagaagcagctgcacatcgcagagaaactgaaagaacgcgagcgggagaatgattcacttaaggataaagttgagaaccttgaaagggaattgcagatgtcagaagaaaaccaggagctagtgattcttgatgccgagaattccaaagcagaagtagagactctaaaaacacaaatagaagagatggccagaagcctgaaagtttttgaattagaccttgtcacgttaaggtctgaaaaagaaaatctgacaaaacaaatacaagaaaaacaaggtcagttgtcagaactagacaagttactctcttcatttaaaagtctgttagaagaaaaggagcaagcagagatacagatcaaagaagaatctaaaactgcagtggagatgcttcagaatcagttaaaggagctaaatgaggcagtagcagccttgtgtggtgaccaagaaattatgaaggccacagaacagagtctagacccaccaatagaggaagagcatcagctgagaaatagcattgaaaagctgagagcccgcctagaagctgatgaaaagaagcagctctgtgtcttacaacaactgaaggaaagtgagcatcatgcagatttacttaagggtagagtggagaaccttgaaagagagctagagatagccaggacaaaccaagagcatgcagctcttgaggcagagaattccaaaggagaggtagagaccctaaaagcaaaaatagaagggatgacccaaagtctgagaggtctggaattagatgttgttactataaggtcagaaaaagaaaatctgacaaatgaattacaaaaagagcaagagcgaatatctgaattagaaataataaattcatcatttgaaaatattttgcaagaaaaagagcaagagaaagtacagatgaaagaaaaatcaagcactgccatggagatgcttcaaacacaattaaaagagctcaatgagagagtggcagccctgcataatgaccaagaagcctgtaaggccaaagagcagaatcttagtagtcaagtagagtgtcttgaacttgagaaggctcagttgctacaaggccttgatgaggccaaaaataattatattgttttgcaatcttcagtgaatggcctcattcaagaagtagaagatggcaagcagaaactggagaagaaggatgaagaaatcagtagactgaaaaatcaaattcaagaccaagagcagcttgtctctaaactgtcccaggtggaaggagagcaccaactttggaaggagcaaaacttagaactgagaaatctgacagtggaattggagcagaagatccaagtgctacaatccaaaaatgcctctttgcaggacacattagaagtgctgcagagttcttacaagaatctagagaatgagcttgaattgacaaaaatggacaaaatgtcctttgttgaaaaagtaaacaaaatgactgcaaaggaaactgagctgcagagggaaatgcatgagatggcacagaaaacagcagagctgcaagaagaactcagtggagagaaaaataggctagctggagagttgcagttactgttggaagaaataaagagcagcaaagatcaattgaaggagctcacactagaaaatagtgaattgaagaagagcctagattgcatgcacaaagaccaggtggaaaaggaagggaaagtgagagaggaaatagctgaatatcagctacggcttcatgaagctgaaaagaaacaccaggctttgcttttggacacaaacaaacagtatgaagtagaaatccagacataccgagagaaattgacttctaaagaagaatgtctcagttcacagaagctggagatagaccttttaaagtctagtaaagaagagctcaataattcattgaaagctactactcagattttggaagaattgaagaaaaccaagatggacaatctaaaatatgtaaatcagttgaagaaggaaaatgaacgtgcccaggggaaaatgaagttgttgatcaaatcctgtaaacagctggaagaggaaaaggagatactgcagaaagaactctctcaacttcaagctgcacaggagaagcagaaaacaggtactgttatggataccaaggtcgatgaattaacaactgagatcaaagaactgaaagaaactcttgaagaaaaaaccaaggaggcagatgaatacttggataagtactgttccttgcttataagccatgaaaagttagagaaagctaaagagatgttagagacacaagtggcccatctgtgttcacagcaatctaaacaagattcccgagggtctcctttgctaggtccagttgttccaggaccatctccaatcccttctgttactgaaaagaggttatcatctggccaaaataaagcttcaggcaagaggcaaagatccagtggaatatgggagaatggtggaggaccaacacctgctaccccagagagcttttctaaaaaaagcaagaaagcagtcatgagtggtattcaccctgcagaagacacggaaggtactgagtttgagccagagggacttccagaagttgtaaagaaagggtttgctgacatcccgacaggaaagactagcccatatatcctgcgaagaacaaccatggcaactcggaccagcccccgcctggctgcacagaagttagcgctatccccactgagtctcggcaaagaaaatcttgcagagtcctccaaaccaacagctggtggcagcagatcacaaaaggtcaaagttgctcagcggagcccagtagattcaggcaccatcctccgagaacccaccacgaaatccgtcccagtcaataatcttcctgagagaagtccgactgacagccccagagagggcctgagggtcaagcgaggccgacttgtccccagccccaaagctggactggagtccaagggcagtgagaactgtaaggtccagtgaaggcactttgtgtgtcagtacccctgggaggtgccagtcattgaatagataaggctgtgcctacaggacttctctttagtcagggcatgctttattagtgaggagaaaacaattccttagaagtcttaaatatattgtactctttagatctcccatgtgtaggtattgaaaaagtttggaagcactgatcacctgttagcattgccattcctctactgcaatgtaaatagtataaagctatgtatataaagctttttggtaatatgttacaattaaaatgacaagcactatatcacaatctctgtttgtatgtgggttttacactaaaaaaatgcaaaacacattttattcttctaattaacagctcctaggaaaatgtagacttttgctttatgatattctatctgtagtatgaggcatggaatagttttgtatcgggaatttctcagagctgagtaaaatgaaggaaaagcatgttatgtgtttttaaggaaaatgtgcacacatatacatgtaggagtgtttatctttctcttacaatctgttttagacatctttgcttatgaaacctgtacatatgtgtgtgtgggtatgtgtttatttccagtgagggctgcaggcttcctagaggtgtgctataccatgcgtctgtcgttgtgcttttttctgtttttagaccaattttttacagttctttggtaagcattgtcgtatctggtgatggattaacatatagcctttgttttctaataaaatagtcgccttcgttttctgtaaaaaaaaaaaaaaaaaaaaaa

SEQ ID NO: 212 - DNA, 1823 bp, Homo sapiens
  misc_feature: v-fos FBJ murine osteosarcoma viral oncogene homolog
ggcacgaggccaagactgagccggcggccgcggcgcagcgaacgagcagtgaccgtgctcctacccagctctgcttcacagcgcccacctgtctccgcccctcggcccctcgcccggctttgcctaaccgccacgatgatgttctcgggcttcaacgcagactacgaggcgtcatcctcccgctgcagcagcgcgtccccggccggggatagcctctcttactaccactcacccgcagactccttctccagcatgggctcgcctgtcaacgcgcaggacttctgcacggacctggccgtctccagtgccaacttcattcccacggtcactgccatctcgaccagtccggacctgcagtggctggtgcagcccgccctcgtctcctctgtggccccatcgcagaccagagcccctcaccctttcggagtccccgccccctccgctggggcttactccagggctggcgttgtgaagaccatgacaggaggccgagcgcagagcattggcaggaggggcaaggtggaacagttatctccagaagaagaagagaaaaggagaatccgaagggaaaggaataagatggctgcagccaaatgccgcaaccggaggagggagctgactgatacactccaagcggagacagaccaactagaagatgagaagtctgctttgcagaccgagattgccaacctgctgaaggagaaggaaaaactagagttcatcctggcagctcaccgacctgcctgcaagatccctgatgacctgggcttcccagaagagatgtctgtggcttcccttgatctgactgggggcctgccagaggttgccaccccggagtctgaggaggccttcaccctgcctctcctcaatgaccctgagcccaagccctcagtggaacctgtcaagagcatcagcagcatggagctgaagaccgagccctttgatgacttcctgttcccagcatcatccaggcccagtggctctgagacagcccgctccgtgccagacatggacctatctgggtccttctatgcagcagactgggagcctctgcacagtggctccctggggatggggcccatggccacagagctggagcccctgtgcactccggtggtcacctgtactcccagctgcactgcttacacgtcttccttcgtcttcacctaccccgaggctgactccttccccagctgtgcagctgcccaccgcaagggcagcagcagcaatgagccttcctctgactcgctcagctcacccacgctgctggccctgtgagggggcagggaaggggaggcagccggcacccacaagtgccactgcccgagctggtgcattacagagaggagaaacacatcttccctagagggttcctgtagacctagggaggaccttatctgtgcgtgaaacacaccaggctgtgggcctcaaggacttgaaagcatccatgtgtggactcaagtccttacctcttccggagatgtagcaaaacgcatggagtgtgtattgttcccagtgacacttcagagagctggtagttagtagcatgttgagccaggcctgggtctgtgtctcttttctctttctccttagtcttctcatagcattaactaatctattgggttcattattggaattaacctggtgctggatattttcaaattgtatctagtgcagctgattttaacaataactactgtgttcctggcaatagtgtgttctgattagaaatgaccaatattatactaagaaaagatacgactttattttctggtagatagaaataaatagctatatccatgaaaaaaaaaaaaaaaaaaaaa

SEQ ID NO: 213 - DNA, 3231 bp, Homo sapiens
  misc_feature: ectonucleotide pyrophosphatase/phosphodiesterase 2 (autotaxin)
cgtgaaggcaaagagaacacgctgcaaaaggcttccaagaatcctcgacatggcaaggaggagctcgttccagtcgtgtcagataatatccctgttcacttttgccgttggagtcagtatctgcttaggattcactgcacatcgaattaagagagcagaaggatgggaggaaggtcctcctacagtgctatcagactccccctggaccaacatctccggatcttgcaagggcaggtgctttgaacttcaagaggctggacctcctgattgtcgctgtgacaacttgtgtaagagctataccagttgctgccatgactttgatgagctgtgtttgaagacagcccgtggctgggagtgtactaaggacagatgtggagaagtcagaaatgaagaaaatgcctgtcactgctcagaggactgcttggccaggggagactgctgtaccaattaccaagtggtttgcaaaggagagtcgcattgggttgatgatgactgtgaggaaataaaggccgcagaatgccctgcagggtttgttcgccctccattaatcatcttctccgtggatggcttccgtgcatcatacatgaagaaaggcagcaaagtcatgcctaatattgaaaaactaaggtcttgtggcacacactctccctacatgaggccggtgtacccaactaaaacctttcctaacttatacactttggccactgggctatatccagaatcacatggaattgttggcaattcaatgtatgatcctgtatttgatgccacttttcatctgcgagggcgagagaaatttaatcatagatggtggggaggtcaaccgctatggattacagccaccaagcaaggggtgaaagctggaacattcttttggtctgttgtcatccctcacgagcggagaatattaaccatattgcggtggctcaccctgccagatcatgagaggccttcggtctatgccttctattctgagcaacctgatttctctggacacaaatatggccctttcggccctgaggagagtagttatggctcaccttttactccggctaagagacctaagaggaaagttgcccctaagaggagacaggaaagaccagttgctcctccaaagaaaagaagaagaaaaatacataggatggatcattatgctgcggaaactcgtcaggacaaaatgacaaatcctctgagggaaatcgacaaaattgtggggcaattaatggatggactgaaacaactaaaactgcgtcggtgtgtcaacgtcatctttgtcggagaccatggaatggaagatgtcacatgtgatagaactgagttcttgagtaattacctaactaatgtggatgatattactttagtgcctggaactctaggaagaattcgatccaaatttagcaacaatgctaaatatgaccccaaagccattattgccaatctcacgtgtaaaaaaccagatcagcactttaagccttacttgaaacagcaccttcccaaacgtttgcactatgccaacaacagaagaattgaggatatccatttattggtggaacgcagatggcatgttgcaaggaaacctttggatgtttataagaaaccatcaggaaaatgctttttccagggagaccacggatttgataacaaggtcaacagcatgcagactgtttttgtaggttatggcccaacatttaagtacaagactaaagtgcctccatttgaaaacattgaactttacaatgttatgtgtgatctcctgggattgaagccagctcctaataatgggacccatggaagtttgaatcatctcctgcgcactaataccttcaggccaaccatgccagaggaagttaccagacccaattatccagggattatgtaccttcagtctgattttgacctgggctgcacttgtgatgataaggtagagccaaagaacaagttggatgaactcaacaaacggcttcatacaaaagggtctacagaagagagacacctcctctatgggcgacctgcagtgctttatcggactagatatgatatcttatatcacactgactttgaaagtggttatagtgaaatattcctaatgctactctggacatcatatactgtttccaaacaggctgaggtttccagcgttcctgaccatctgaccagttgcgtccggcctgatgtccgtgtttctccgagtttcagtcagaactgtttggcctacaaaaatgataagcagatgtcctacggattcctctttcctccttatctgagctcttcaccagaggctaaatatgatgcattccttgtaaccaatatggttccaatgtatcctgctttcaaacgggtctggaattatttccaaagggtattggtgaagaaatatgcttcggaaagaaatggagttaacgtgataagtggaccaatcttcgactatgactatgatggcttacatgacacagaagacaaaataaaacagtacgtggaaggcagttccattcctgttccaactcactactacagcatcatcaccagctgtctggatttcactcagcctgccgacaagtgtgacggccctctctctgtgtcctccttcatcctgcctcaccggcctgacaacgaggagagctgcaatagctcagaggacgaatcaaaatgggtagaagaactcatgaagatgcacacagctagggtgcgtgacattgaacatctcaccagcctggacttcttccgaaagaccagccgcagctacccagaaatcctgacactcaagacatacctgcatacatatgagagcgagatttaactttctgagcatctgcagtacagtcttatcaactggttgtatatttttatattgtttttgtatttattaatttgaaaccaggacattaaaaatgttagtattttaatcctgtaccaaatctgacatattatgcctgaatgactccactgtttttctctaatgcttgatttaggtagccttgtgttctgagtagagcttgtaataaatactgcagcttgagaaaaagtggaagcttctaaatggtgctgcagatttgatatttgcattgaggaaatattaattttccaatgcacagttgccacatttagtcctgtactgtatggaaacactgattttgtaaagttgcctttatttgctgttaactgttaactatgacagatatatttaagccttataaaccaatcttaaacataataaatcacacattcagtttt

SEQ ID NO: 214 - DNA, 1167 bp, Homo sapiens
  misc_feature: aurora kinase B
gaattcggcacgaaggagagtagcagtgccttggaccccagctctcctccccctttctctctaaggatggcccagaaggagaactcctacccctggccctacggccgacagacggctccatctggcctgagcaccctgccccagcgagtcctccggaaagagcctgtcaccccatctgcacttgtcctcatgagccgctccaatgtccagcccacagctgcccctggccagaaggtgatggagaatagcagtgggacacccgacatcttaacgcggcacttcacaattgatgactttgagattgggcgtcctctgggcaaaggcaagtttggaaacgtgtacttggctcgggagaagaaaagccatttcatcgtggcgctcaaggtcctcttcaagtcccagatagagaaggagggcgtggagcatcagctgcgcagagagatcgaaatccaggcccacctgcaccatcccaacatcctgcgtctctacaactatttttatgaccggaggaggatctacttgattctagagtatgccccccgcggggagctctacaaggagctgcagaagagctgcacatttgacgagcagcgaacagccacgatcatggaggagttggcagatgctctaatgtactgccatgggaagaaggtgattcacagagacataaagccagaaaatctgctcttagggctcaagggagagctgaagattgctgacttcggctggtctgtccatgcgacctccctgaggaggaagacaatgtgtggcaccctggactacctgcccccagagatgattgaggggcgcatcgacaatgagaaggtggatctgtggtgcattggagtgctttgctatgagctgctggtggggaacccatttgagagtgcatcacacaacgagacctatcgccgcatcgtcaaggtggacctaaagttccccgcttctgtgcccacgggagcccaggacctcatctccaaactgctcaggcataacccctcggaacggctgcccctggcccaggtctcagcccacccttgggtccgggccaactctcggagggtgctgcctccctctgcccttcaatctgtcgcctgatggtccctgtcattcactcgggtgcgtgtgtttgtatgtctgtgtatgtataggggaaagaagggatcc

SEQ ID NO: 215 - DNA, 1126 bp, Homo sapiens
  misc_feature: glutathione transferase zeta 1 (maleylacetoacetate isomerase)
gccagaggcgaccggaaggatctttctagtccagcccctcgctttacccggacgaaagacacgggcctgattcgtcgagtctcactgagccttagtcgtcggcaggtcccaggcgcgaagtttctcggcctggaggagggggtcgcgcgaagtgccagatgcaggcggggaagcccatcctctattcctatttccgaagctcctgctcatggagagttcgaattgctctggccttgaaaggcatcgactacgagacggtgcccatcaatctcataaaggatgggggccaacagttttctaaggacttccaggcactgaatcctatgaagcaggtgccaaccctgaagattgatggaatcaccattcaccagtcactggccatcattgagtatctagaggagatgcgtcccactccgcgacttctgcctcaggacccaaagaagagggccagcgtgcgtatgatttctgacctcatcgctggtggcatccagcccctgcagaacctgtctgtcctgaagcaagtgggagaggagatgcagctgacctgggcccagaacgccatcacttgtggctttaacgccctggagcagatcctacagagcacagcgggcatatactgtgtaggagacgaggtgaccatggctgatctgtgcttggtgcctcaggtggcaaatgctgaaagattcaaggtggatctcaccccctaccctaccatcagctccatcaacaagaggctgctggtcttggaggccttccaggtgtctcacccctgccggcagccagatacacccactgagctgagggcctagctcccaaatcctgccccgttggcacagggccacaggagcagaagctgggtgggctgaagaggcctggaaacgagagtcttaattgaggagatgggagactcgaactctagccctggatctgccttcctgctgaaacttgttccacctcagtcccctcatctgtcacacgcatgtggggtggagtagggagatgcggggagcagggtgggcaggaatactgttatctatgtgacggggcagtcgtgaggctgagatgagaatgcggattaaaatgcctggcgtgctcaccgtaacaccaaaaaaaaaaaaaaaaaaaa

SEQ ID NO: 216 - DNA, 3332 bp, Homo sapiens
  misc_feature: BUB1 budding uninhibited by benzimidazoles 1 homolog (yeast)
ggtttgccgctgccggccagcgtcctctggccatggacaccccggaaaatgtccttcagatgcttgaagcccacatgcagagctacaagggcaatgaccctcttggtgaatgggaaagatacatacagtgggtagaagagaattttcctgagaataaagaatacttgataactttactagaacatttaatgaaggaatttttagataagaagaaataccacaatgacccaagattcatcagttattgtttaaaatttgctgagtacaacagtgacctccatcaattttttgagtttctgtacaaccatgggattggaaccctgtcatcccctctgtacattgcctgggcggggcatctggaagcccaaggagagctgcagcatgccagtgctgtccttcagagaggaattcaaaaccaggctgaacccagagagttcctgcaacaacaatacaggttatttcagacacgcctcactgaaacccatttgccagctcaagctagaacctcagaacctctgcataatgttcaggttttaaatcaaatgataacatcaaaatcaaatccaggaaataacatggcctgcatttctaagaatcagggttcagagctttctggagtgatatcttcagcttgtgataaagagtcaaatatggaacgaagagtgatcacgatttctaaatcagaatattctgtgcactcatctttggcatccaaagttgatgttgagcaggttgttatgtattgcaaggagaagcttattcgtggggaatcagaattttcctttgaagaattgagagcccagaaatacaatcaacggagaaagcatgagcaatgggtaaatgaagacagacattatatgaaaaggaaagaagcaaatgcttttgaagaacagctattaaaacagaaaatggatgaacttcataagaagttgcatcaggtggtggagacatcccatgaggatctgcccgcttcccaggaaaggtccgaggttaatccagcacgtatggggccaagtgtaggctcccagcaggaactgagagcgccatgtcttccagtaacctatcagcagacaccagtgaacatggaaaagaacccaagagaggcacctcctgttgttcctcctttggcaaatgctatttctgcagctttggtgtccccagccaccagccagagcattgctcctcctgttcctttgaaagcccagacagtaacagactccatgtttgcagtggccagcaaagatgctggatgtgtgaataagagtactcatgaattcaagccacagagtggagcagagatcaaagaagggtgtgaaacacataaggttgccaacacaagttcttttcacacaactccaaacacatcactgggaatggttcaggcaacgccatccaaagtgcagccatcacccaccgtgcacacaaaagaagcattaggtttcatcatgaatatgtttcaggctcctacacttcctgatatttctgatgacaaagatgaatggcaatctctagatcaaaatgaagatgcatttgaagcccagtttcaaaaaaatgtaaggtcatctggggcttggggagtcaataagatcatctcttctttgtcatctgcttttcatgtgtttgaagatggaaacaaagaaaattatggattaccacagcctaaaaataaacccacaggagccaggacctttggagaacgctctgtcagcagacttccttcaaaaccaaaggaggaagtgcctcatgctgaagagtttttggatgactcaactgtatggggtattcgctgcaacaaaaccctggcacccagtcctaagagcccaggagacttcacatctgctgcacaacttgcgtctacaccattccacaagcttccagtggagtcagtgcacattttagaagataaagaaaatgtggtagcaaaacagtgtacccaggcgactttggattcttgtgaggaaaacatggtggtgccttcaagggatggaaaattcagtccaattcaagagaaaagcccaaaacaggccttgtcgtctcacatgtattcagcatccttacttcgtctgagccagcctgctgcaggtggggtacttacctgtgaggcagagttgggcgttgaggcttgcagactcacagacactgacgctgccattgcagaagatccaccagatgctattgctgggctccaagcagaatggatgcagatgagttcacttgggactgttgatgctccaaacttcattgttgggaacccatgggatgataagctgattttcaaacttttatctgggctttctaaaccagtgagttcctatccaaatacttttgaatggcaatgtaaacttccagccatcaagcccaagactgaatttcaattgggttctaagctggtctatgtccatcaccttcttggagaaggagcctttgcccaggtgtacgaagctacccagggagatctgaatgatgctaaaaataaacagaaatttgttttaaaggtccaaaagcctgccaacccctgggaattctacattgggacccagttgatggaaagactaaagccatctatgcagcacatgtttatgaagttctattctgcccacttattccagaatggcagtgtattagtaggagagctctacagctatggaacattattaaatgccattaacctctataaaaatacccctgaaaaagtgatgcctcaaggtcttgtcatctcttttgctatgagaatgctttacatgattgagcaagtgcatgactgtgaaatcattcatggagacattaaaccagacaatttcatacttggaaacggatttttggaacaggatgatgaagatgatttatctgctggcttggcactgattgacctgggtcagagtatagatatgaaactttttccaaaaggaactatattcacagcaaagtgtgaaacatctggttttcagtgtgttgagatgctcagcaacaaaccatggaactaccagatcgattactttggggttgctgcaacagtatattgcatgctctttggcacttacatgaaagtgaaaaatgaaggaggagagtgtaagcctgaaggtctttttagaaggcttcctcatttggatatgtggaatgaattttttcatgttatgttgaatattccagattgtcatcatcttccatctttggatttgttaaggcaaaagctgaagaaagtatttcaacaacactatactaacaagattagggccctacgtaataggctaattgtactgctcttagaatgtaagcgttcacgaaaataaaatttggatatagacagtccttaaaaaaaaaaaaaaaaaaaa

SEQ ID NO: 217 - DNA, 3351 bp, Homo sapiens
  misc_feature: kinesin family member C3
gcgggaggggcgcgagcgggctggccgaggaggaggcggcggcgtggagctgcctcctgccggcgggccgggccgggccgagccccgggcgctgcggcgacgcctggatcctgcctccgccaggccggctgcctggtgccccgaggaggctgctgagccccaggccatggtcccctctcgcaggacgtggaacctgggagccacgccctcgctgcggggcctgtggagagtgggccgggccccggagcccgagccggggatggctcgccccgccccagccccagccagcccggccgcccgccctttcccacacaccggcccggggaggttgagaactgggcgtggaaaagataccccagtctgcggtgacgaggactccagtgcccgaagtgcagctcgcccagccctagctcagtgccgagcccttagcgtggactgggctggccccggaagcccccacgggctctacctgaccctgcaggtagaacacctgaaggagaagctcattagccaggcccaggaagtgagccgactgcgatctgagctggggggcaccgacttggagaagcaccgggacctgctgatggtggagaatgagcgactgaggcaggagatgcggcgctgtgaggccgagctgcaagagctgcgcacaaagccagcaggtccctgcccaggttgtgagcacagccaggagagcgcccagctccgtgacaagctgtcccagctgcagctggagatggcggaaagcaaaggcatgctgtcagagctgaacctagaggtgcagcagaagaccgaccggctggctgaggtggagctgcgactcaaggactgcctggctgagaaggcacaggaggaggagcggctcagtcggcgcctgcgtgacagccacgagaccattgccagcctgcgggcccagtccccacctgtcaagtatgtcatcaagacagtggaggtggagtcgtccaagaccaagcaggccctcagcgagtcccaggcccggaaccagcacctgcaggagcaggtggctatgcagaggcaggtgctgaaggagatggaacagcagctgcagagctcacaccagctgaccgcgcggctccgggcgcagattgccatgtacgagtcagagctggagcgggcccatgggcagatgctggaggagatgcagtccctggaagaggacaagaaccgggccattgaggaggcctttgccagagcccaggtggagatgaaggctgtgcacgagaatctagcaggcgtccggaccaacttgctgaccttgcagccggcactgcggaccctcaccaacgactacaatgggctcaagcggcaggtgcgcggcttcccactgctgctgcaggaggccctcaggagtgtcaaggccgagataggccaggccatcgaggaggtcaacagcaacaaccaggagctgctgcgcaagtaccgccgcgagctgcagctgcgtaagaagtgccacaatgagctcgtgcggctgaaagggaacatccgagtgattgctcgtgtccggccagtcaccaaagaggatggggaaggacctgaggccaccaatgctgtgactttcgatgccgacgacgactccatcatccacctgctgcacaagggcaagcctgtgtccttcgagctggacaaggtcttctccccacaggcctcgcagcaggacgtgttccaggaggtgcaggccctggtcacctcttgcattgatggcttcaatgtctgcatctttgcgtacggccagacgggcgccggcaagacgtacacgatggaggggaccgctgagaacccaggtatcaaccagcgggccctgcagctgctcttctccgaggtgcaggagaaggcgtctgactgggagtacaccatcaccgtcagcgctgcggagatctacaatgaggtcctcagggacctgctagggaaagagcctcaggaaaaactggagatccggctgtgcccagatggcagtgggcagctgtatgtaccagggctgactgagttccaagtgcagagcgtggacgacatcaacaaggtgtttgagtttggccacactaatcgcacgaccgagttcaccaacctgaacgagcacagctcccgctcgcacgcgctgctcatcgtgacggtgcgaggcgtggactgcagcacaggcctccgcaccacggggaagctgaacctggtggacttggctggctcggagcgcgtgggcaagtcgggggccgagggcagccgcctgcgggaggcgcagcacatcaacaagtcgctgtcggctctgggggacgtcattgctgccctgcgctcccgccagggccacgtgcccttccgcaactccaagctcacctacctgctgcaggattcgcttagtggtgacagcaagaccctcatggtggtacaggtgtcccccgtggagaagaacactagcgagacgctctattccctcaagtttgctgagagggtgcgctctgtggagctggggcctgggctacgcagggcagagcttgggtcctggtcaagccaggagcatctagagtgggagccggcttgtcagacgccacagccctcggcacgggcccactcagcccccagctctgggaccagtagccgccctggatccatccggaggaagctgcagccctcggggaagtcgcggccactgcctgtgtgacggatgtgaccccgctgggcctgaagctgggccctcactggcctgtccctgctgcagcgccaggacccccggaggtagaggcgagagtggaggctcttcttctgccccgtctcccctcaaagatgagaaacatgttcagaaggaaacggtgtctctcggctgtggctctgagtgcaaattgcatgggcggaaaggcgggggtggctgctcttcctggcaggcctgggccatcagcgaactgggccccgtgaggagggcgggagtgtggaggagggtgggcctctcacccaggctttctcggcccctctcctcagcttgcagagctggccagccccctccttagggggtgggcgaggagcctctgggcagacccaagaaccatggggactggggtgggttggtggcaccaatggcagccctccccgcccctctccttcaaggagggttcccgcagctggggggtgtgcggaggcgcatggcctcccgccacggggccgtgctgtgtttatggctggcagaggcagccagcgggtgggggattctgctgctcgctcacctgcctggctcgctggtctctcgaattttcttccctctgaaatcctatttaagaacttttggaagcttagccatttttacttattaaaataaaagaagcctttttacacaaaaaaaaaaaaaaaaaa

SEQ ID NO: 218 - DNA, 1051 bp, Homo sapiens
  misc_feature: fructose-1,6-bisphosphatase 1
tcaagcatggctgaccaggcgcccttcgacacggacgtcaacaccctgacccgcttcgtcatggaggagggcaggaaggcccgcggcacgggcgagttgacccagctgctcaactcgctctgcacagcagtcaaagccatctcttcggcggtgcgcaaggcgggcatcgcgcacctctatggcattgctggttctaccaacgtgacaggtgatcaagttaagaagctggacgtcctctccaacgacctggttatgaacatgttaaagtcatcctttgccacgtgtgttctcgtgtcagaagaagataaacacgccatcatagtggaaccggagaaaaggggtaaatatgtggtctgttttgatccccttgatggatcttccaacatcgattgccttgtgtccgttggaaccatttttggcatctatagaaagaaatcaactgatgagccttctgagaaggatgctctgcaaccaggccggaacctggtggcagccggctacgcactgtatggcagtgccaccatgctggtccttgccatggactgtggggtcaactgcttcatgctggacccggccatcggggagttcattttggtggacaaggatgtgaagataaaaaagaaaggtaaaatctacagccttaacgagggctacgccaaggactttgaccctgccgtcactgagtacatccagaggaagaagttccccccagataattcagctccttatggggcccggtatgtgggctccatggtggctgatgttcatcgcactctggtctacggagggatatttctgtaccccgctaacaagaagagccccaatggaaagctgagactgctgtacgaatgcaaccccatggcctacgtcatggagaaggctgggggaatggccaccactgggaaggaggccgtgttagacgtcattcccacagacattcaccagagggcgccggtgatcttggggtcccccgacgacgtgctcgagttcctgaaggtgtatgagaagcactctgcccagtgagcacctgccctgcctgcatccggagaat

SEQ ID NO: 219 - DNA, 2756 bp, Homo sapiens
  misc_feature: hyaluronan-mediated motility receptor (RHAMM)
tcgagcggccgcccgggcaggtgtgccagtcaccttcagtttctggagctggccgtcaacatgtcctttcctaaggcgcccttgaaacgattcaatgacccttctggttgtgcaccatctccaggtgcttatgatgttaaaactttagaagtattgaaaggaccagtatcctttcagaaatcacaaagatttaaacaacaaaaagaatctaaacaaaatcttaatgttgacaaagatactaccttgcctgcttcagctagaaaagttaagtcttcggaatcaaagaaggaatctcaaaagaatgataaagatttgaagatattagagaaagagattcgtgttcttctacaggaacgtggtgcccaggacaggcggatccaggatctggaaactgagttggaaaagatggaagcaaggctaaatgctgcactaagggaaaaaacatctctctctgcaaataatgctacactggaaaaacaacttattgaattgaccaggactaatgaactactaaaatctaagttttctgaaaatggtaaccagaagaatttgagaattctaagcttggagttgatgaaacttagaaacaaaagagaaacaaagatgaggggtatgatggctaagcaagaaggcatggagatgaagctgcaggtcacccaaaggagtctcgaagagtctcaagggaaaatagcccaactggagggaaaacttgtttcaatagagaaagaaaagattgatgaaaaatctgaaacagaaaaactcttggaatacatcgaagaaattagttgtgcttcagatcaagtggaaaaatacaagctagatattgcccagttagaagaaaatttgaaagagaagaatgatgaaattttaagccttaagcagtctcttgaggacaatattgttatattatctaaacaagtagaagatctaaatgtgaaatgtcagctgcttgaaacagaaaaagaagaccatgtcaacaggaatagagaacacaacgaaaatctaaatgcagagatgcaaaacttagaacagaagtttattcttgaacaacgggaacatgaaaagcttcaacaaaaagaattacaaattgattcacttctgcaacaagagaaagaattatcttcgagtcttcatcagaagctctgttcttttcaagaggaaatggttaaagagaagaatctgtttgaggaagaattaaagcaaacactggatgagcttgataaattacagcaaaaggaggaacaagctgaaaggctggtcaagcaattggaagaggaagcaaaatctagagctgaagaattaaaactcctagaagaaaagctgaaagggaaggaggctgaactggagaaaagtagtgctgctcatacccaggccaccctgcttttgcaggaaaagtatgacagtatggtgcaaagccttgaagatgttactgctcaatttgaaagctataaagcgttaacagccagtgagatagaagatcttaagctggagaactcatcattacaggaaaaagcggccaaggctgggaaaaatgcagaggatgttcagcatcagattttggcaactgagagctcaaatcaagaatatgtaaggatgcttctagatctgcagaccaagtcagcactaaaggaaacagaaattaaagaaatcacagtttcttttcttcaaaaaataactgatttgcagaaccaactcaagcaacaggaggaagactttagaaaacagctggaagatgaagaaggaagaaaagctgaaaaagaaaatacaacagcagaattaactgaagaaattaacaagtggcgtctcctctatgaagaactatataataaaacaaaaccttttcagctacaactagatgcttttgaagtagaaaaacaggcattgttgaatgaacatggtgcagctcaggaacagctaaataaaataagagattcatatgctaaattattgggtcatcagaatttgaaacaaaaaatcaagcatgttgtgaagttgaaagatgaaaatagccaactcaaatcggaagtatcaaaactccgctgtcagcttgctaaaaaaaaacaaagtgagacaaaacttcaagaggaattgaataaagttctaggtatcaaacactttgatccttcaaaggcttttcatcatgaaagtaaagaaaattttgccctgaagaccccattaaaagaaggcaatacaaactgttaccgagctcctatggagtgtcaagaatcatggaagtaaacatctgagaaacctgttgaagattatttcattcgtcttgttgttattgatgttgctgttattatatttgacatgggtattttataatgttgtatttaattttaactgccaatccttaaatatgtgaaaggaacattttttaccaaagtgtcttttgacattttattttttcttgcaaatacctcctccctaatgctcacctttatcacctcattctgaaccctttcgctggctttccagcttagaatgcatctcatcaacttaaaagtcagtatcatattattatcctcctgttctgaaaccttagtttcaagagtctaaaccccagattcttcagcttgatcctggaggcttttctagtctgagcttctttagctaggctaaaacaccttggcttgttattgcctctactttgattcttgataatgctcacttggtcctacctattatcctttctacttgtccagttcaaataagaaataaggacaagcctaacttcatagtaacctctctatttt

SEQ ID NO: 220 - DNA, 669 bp, Homo sapiens
  misc_feature: cyclin-dependent kinase inhibitor 3 (CDK2-associated dual specificity phosphatase)
atgaagccgcccagttcaatacaaacaagtgagtttgactcatcagatgaagagcctattgaagatgaacagactccaattcatatatcacggctatctttgtcacgagtgaattgttctcagtttctcggtttatgtgctcttccaggttgtaaatttaaagatgttagaagaaatgtccaaaaagatacagaagaactaaagagctgtggtatacaagacatatttgttttctacaccagaggggaactgtcaaaatatagagtcccaaaccttctggatctctaccagcaatgtggaattatcacccatcatcatccaatcgcagatggagggactcctgacatagccagctgctgtgaaataatggaagagcttacaacctgccttaaaaattaccgaaaaaccttaatacactgctatggaggacttgggagatcttgtcttgtagctgcttgtctcctactatacctgtctgacacaatatcaccagagcaagccatagacagcctgcgagacctaagaggatccggggcaatacagaccatcaagcaatacaattatcttcatgagtttcgggacaaattagctgcacatctatcatcaagagattcacaatcaagatctgtatcaagataaaggaattcaaatagcatatatatgaccatg

SEQ ID NO: 221 - DNA, 839 bp, Homo sapiens
  misc_feature: chromobox homolog 5 (HP1 alpha homolog, Drosophila)
gcgcagaaggcggcggcggtggtggcttgtggtgcggcctcaccatacaggaacagggcagacgttagcgtgagtgatcactctcaatcccggggacctggtggccttagtctttcaggtggaacggtgtgcgacatgggaaagaaaaccaagcggacagctgacagttcttcttcagaggatgaggaggagtatgttgtggagaaggtgctagacaggcgcgtggttaagggacaagtggaatatctactgaagtggaaaggcttttctgaggagcacaatacttgggaacctgagaaaaacttggattgccctgagctaatttctgaatttatgaaaaagtataagaagatgaaggagggtgaaaataataaacccagggagaagtcagaaagtaacaagaggaaatccaatttctcaaacagtgccgatgacatcaaatctaaaaaaaagagagagcagagcaatgatatcgctcggggctttgagagaggactggaaccagaaaagatcattggggcaacagattcctgtggtgatttaatgttcctaatgaaatggaaagacacagatgaagctgacctggttcttgcaaaagaagctaatgtgaaatgtccacaaattgtgatagcattttatgaagagagactgacatggcatgcatatcctgaggatgcggaaaacaaagagaaagaaacagcaaagagctaaaggaggggatggtctctgtcatttctctttgtacataatacatttacctccctgcctcctctcctttctacccacccctttctatcctaaacacatccaaaaaaaatgtgcttatcactgtgctccac

SEQ ID NO: 222 - DNA, 1649 bp, Homo sapiens
  misc_feature: ribonucleotide reductase M2 polypeptide
ccgtcctgtcctggctgctcgctctgcttcgctgcgccgccactatgctctccctccgtgtcccgctcgcgcccatcacggacccgcagcagctgcagctctcgccgctgaaggggctcagcttggtcgacaaggagaacacgccgccggccctgagcgggacccgcgtcctggccagcaagaccgcgaggaggatcttccaggagcccacggagccgaaaactaaagcagctgcccccggcgtggaggatgagccgctgctgagagaaaacccccgccgctttgtcatcttccccatcgagtaccatgatatctggcagatgtataagaaggcagaggcttccttttggaccgccgaggaggtggacctctccaaggacattcagcactgggaatccctgaaacccgaggagagatattttatatcccatgttctggctttctttgcagcaagcgatggcatagtaaatgaaaacttggtggagcgatttagccaagaagttcagattacagaagcccgctgtttctatggcttccaaattgccatggaaaacatacattctgaaatgtatagtcttcttattgacacttacataaaagatcccaaagaaagggaatttctcttcaatgccattgaaacgatgccttgtgtcaagaagaaggcagactgggccttgcgctggattggggacaaagaggctacctatggtgaacgtgttgtagcctttgctgcagtggaaggcattttcttttccggttcttttgcgtcgatattctggctcaagaaacgaggactgatgcctggcctcacattttctaatgaacttattagcagagatgagggtttacactgtgattttgcttgcctgatgttcaaacacctggtacacaaaccatcggaggagagagtaagagaaataattatcaatgctgttcggatagaacaggagttcctcactgaggccttgcctgtgaagctcattgggatgaattgcactctaatgaagcaatacattgagtttgtggcagacagacttatgctggaactgggttttagcaaggttttcagagtagagaacccatttgactttatggagaatatttcactggaaggaaagactaacttctttgagaagagagtaggcgagtatcagaggatgggagtgatgtcaagtccaacagagaattcttttaccttggatgctgacttctaaatgaactgaagatgtgcccttacttggctgattttttttttccatctcataagaaaaatcagctgaagtgttaccaactagccacaccatgaattgtccgtaatgttcattaacagcatctttaaaactgtgtagctacctcacaaccagtcctgtctgtttatagtgctggtagtatcaccttttgccagaaggcctggctggctgtgacttaccatagcagtgacaatggcagtcttggctttaaagtgaggggtgaccctttagtgagcttagcacagcgggattaaacagtcctttaaccagcacagccagttaaaagatgcagcctcactgcttcaacgcagattttaatgtttacttaaatataaacctggcactttacaaacaaataaacattgtttgtactcacaaaaaaaaaaaaaaaaaaaaaaa

SEQ ID NO: 223 - DNA, 1065 bp, Homo sapiens
  misc_feature: chemokine (C-X-C motif) ligand 2
gaattaggcacgagagctccttgccagctctcctcctcgcacagccgctcgaaccgcctgctgagccccatggcccgcgccacgctctccgccgcccccagcaatccccggctcctgcgagtggcgctgctgctcctgctcctggtggccgccagccggcgcgcagcaggagcgcccctggccactgaactgcgctgccagtgcttgcagaccctgcagggaattcacctcaagaacatccaaagtgtgaaggtgaagtcccccggaccccactgcgcccaaaccgaagtcatagccacactcaagaatgggcagaaagcttgtctcaaccccgcatcgcccatggttaagaaaatcatcgaaaagatgctgaaaaatggcaaatccaactgaccagaaggaaggaggaagcttattggtggctgttcctgaaggagccctgccttacaggaacagaagaggaaagagagacacagctgcagaggccacctggattgcgcctaatgtgtttgagcatcacttaggagaagtcttctatttatttatttatttatttatttatttgtttgttttagaagattctatgttaatattttatgtgtaaaataaggttatgattgaatctacttgcacactctcccattatatttattgtttattttaggtcaaacccaagttagttcaatcctgattcatatttaatttgaagatagaaggtttgcagatattctctagtcatttgttaatatttcttcgtgatgacatatcacatgtcagccactgtgatagaggctgaggaatccaagaaaatggccagtaagatcaatgtgacggcagggaaatgtatgtgtgtctattttgtaactgtaaagatgaatgtcagttgttatttattgaaatgatttcacagtgtgtggtcaacatttctcatgttgaagctttaagaactaaaatgttctaaatatcccttggacattttatgtctttcttgtaagatactgccttgtttaatgttaattatgcagtgtttccctctgtgttagagcagagaggtttcgatattta

SEQ ID NO: 224 - DNA, 1209 bp, Homo sapiens
  misc_feature: uridine-cytidine kinase 2
ggcacgaggctccttcgggaaacccagccccgtcaccgggctccgagcggctcgcaggcgagcgacagcggcctcagccccggcagcgcccagcggcggctgcggaaagcggagggagtccgacgcgggcgcgggcggggagcgtgcgtccgttcgcacaggcagcgggaggaggggcggcgcgaaccatggccggggacagcgagcagaccctgcagaaccaccagcagcccaacggcggcgagcccttccttataggcgtcagcgggggaacagctagcggcaagtcttccgtgtgtgctaagatcgtgcagctcctggggcagaatgaggtggactatcgccagaagcaggtggtcatcctgagccaggatagcttctaccgtgtccttacctcggagcagaaggccaaagccctgaagggccagttcaactttgaccacccggatgcctttgacaatgaactcattctcaaaacactcaaagaaatcactgaagggaaaacagtccagatccccgtgtatgactttgtctcccattcccggaaggaggagacagttactgtctatcccgcagacgtggtgctctttgaagggatcctggccttctactcccaggaggtacgagacctgttccagatgaagctttttgtggatacagatgcggacacccggctctcacgcagagtattaagggacatcagcgagagaggcagggatcttgagcagattttatctcagtacattacgttcgtcaagcctgcctttgaggaattctgcttgccaacaaagaagtatgctgatgtgatcatccctagaggtgcagataatctggtggccatcaacctcatcgtgcagcacatccaggacatcctgaatggagggccctccaaacggcagaccaatggctgtctcaacggctacaccccttcacgcaagaggcaggcatcggagtccagcagcaggccgcattgacccgtctccatcggaccccagcccctatctccaagagacagaggaggggtcaggaggcactgctcatctgtacatactgtttcctatgacattactgtatttaagaaaacaccatggagatgaaatgcctttgattttttttttctttttgtactttggaacgacaaaatgaaacagaacttgaccctgagcttaaataacaaaactgtgccaactaaaaaaaaaaaaaaaaaaa

SEQ ID NO: 225 - DNA, 1278 bp, Homo sapiens
  misc_feature: secreted phosphoprotein 1 (osteopontin, bone sialoprotein I, early T-lymphocyte activation 1
gcaggaggaggcagagcacagcatcgtcgggaccagactcgtctcaggccagttgcagccttctcagccaaacgccgaccaaggaaaactcactaccatgagaattgcagtgatttgcttttgcctcctaggcatcacctgtgccataccagttaaacaggctgattctggaagttctgaggaaaagcagctttacaacaaatacccagatgctgtggccacatggctaaaccctgacccatctcagaagcagaatctcctagccccacagaatgctgtgtcctctgaagaaaccaatgactttaaacaagagaccctcccaagtaagtccaacgaaagccatgaccacatggatgatatggatgatgaagatgatgacgaccatgtggacagccaggactccattgactcgaacgactctgatgatgtagatgacactgatgattctcaccagtctgatgagtctcaccattctgatgaatctgatgaactggtcactgattttcccacggacctgccagcaaccgaagttttcactccagttgtccccacagtagacacatatgatggccgaggtgatagtgtggtttatggactgaggtcaaaatctaagaagtttcgcagacctgacatccagtaccctgatgctacagacgaggacatcacctcacacatggaaagcgaggagttgaatggtgcatacaaggccatccccgttgcccaggacctgaacgcgccttctgattgggacagccgtgggaaggacagttatgaaacgagtcagctggatgaccagagtgctgaaacccacagccacaagcagtccagattatataagcggaaagctaatgatgagagcaatgagcattccgatgtgattgatagtcaggaactttccaaagtcagccgtgaattccacagccatgaatttcacagccatgaagatatgctggttgtagaccccaaaagtaaggaagaagataaacacctgaaatttcgtatttctcatgaattagatagtgcatcttctgaggtcaattaaaaggagaaaaaatacaatttctcactttgcatttagtcaaaagaaaaaatgctttatagcaaaatgaaagagaacatgaaatgcttctttctcagtttattggttgaatgtgtatctatttgagtctggaaataactgatgtgtttgataattagtttagtttgtggcttcatggaaactccctgtaaactaaaagcttcagggttatgtctatgttcattctatagaagaaatgc

SEQ ID NO: 226 - DNA, 2000 bp, Homo sapiens
  misc_feature: solute carrier family 7, (cationic amino acid transporter, y+ system) member 11
cctgtgaacactatagcgctgagagagacagtctgaaagcagaggaagacatcgatcagtaacaccaagagacaccaaagttgaaagttttgttttctttccctctgttttatttttcccccgtgtgtccctactatggtcagaaagcctgttgtgtccaccatctccaaaggaggttacctgcagggaaatgttaacgggaggctgccttccctgggcaacaaggagccacctgggcaggagaaagtgcagctgaagaggaaagtcactttactgaggggagtctccattatcattggcaccatcattggagcaggaatcttcatctctcctaagggcgtgctccagaacacgggcagcgtgggcatgtctctgaccatctggacggtgtgtggggtcctgtcactatttggagctttgtcttatgctgaattgggaacaactataaagaaatctggaggtcattacacatatattttggaagtctttggtccattaccagcttttgtacgagtctgggtggaactcctcataatacgccctgcagctactgctgtgatatccctggcatttggacgctacattctggaaccattttttattcaatgtgaaatccctgaacttgcgatcaagctcattacagctgtgggcataactgtagtgatggtcctaaatagcatgagtgtcagctggagcgcccggatccagattttcttaaccttttgcaagctcacagcaattctgataattatagtccctggagttatgcagctaattaaaggtcaaacgcagaactttaaagacgccttttcaggaagagattcaagtattacgcggttgccactggctttttattatggaatgtatgcatatgctggctggttttacctcaactttgttactgaagaagtagaaaaccctgaaaaaaccattccccttgcaatatgtatatccatggccattgtcaccattggctatgtgctgacaaatgtggcctactttacgaccattaatgctgaggagctgctgctttcaaatgcagtggcagtgaccttttctgagcggctactgggaaatttctcattagcagttccgatctttgttgccctctcctgctttggctccatgaacggtggtgtgtttgctgtctccaggttattctatgttgcgtctcgagagggtcaccttccagaaatcctctccatgattcatgtccgcaagcacactcctctaccagctgttattgttttgcaccctttgacaatgataatgctcttctctggagacctcgacagtcttttgaatttcctcagttttgccaggtggctttttattgggctggcagttgctgggctgatttatcttcgatacaaatgcccagatatgcatcgtcctttcaaggtgccactgttcatcccagctttgttttccttcacatgcctcttcatggttgccctttccctctattcggacccatttagtacagggattggcttcgtcatcactctgactggagtccctgcgtattatctctttattatatgggacaagaaacccaggtggtttagaataatgtcagggttcctagcactgatgcctgcacaagcatgtgatatgtgaaataaaatggattcttctatagctaaatgagttccctctggggagagttctggtactgcaatcacaatgccagatggtgtttatgggctatttgtgtaagtaagtggtaagatgctatgaagtaagtgtgtttgttttcatcttatggaaactcttgatgcatgtgcttttgtatggaataaattttggtgcaatatgatgtcattcaactttgcattgaattgaattttggttgtatttatatgtattatacctgtcacgcttctagttgcttcaaccattttataaccatttttgtacatattttacttgaaaatattttaaatggaaatttaaataaacatttgatagtttacataataaaaaaaaaaaaaaaaaaa

SEQ ID NO: 227 - DNA, 2232 bp, Homo sapiens
  misc_feature: neutrophil cytosolic factor 2 (65kDa, chronic granulomatous disease, autosomal 2)
tctctctctgcttctttccttttctctctcatggtagggttatgagtcagttgccaaaaggtggggacatttcctgatgcatttgcaacactgagaagttatcttaagggaggctgggccccattctactcatctggcccagaaagtgaacaccttgggggccactaaggcagccctgctaggggagacgctccaacctgtcttctctctgtctcctggcagctctcttggcctcctagtttctacctaatcatgtccctggtggaggccatcagcctctggaatgaaggggtgctggcagcggacaagaaggactggaagggagccctggatgccttcagtgccgtccaggacccccactcccggatttgcttcaacattggctgcatgtacactatcctgaagaacatgactgaagcagagaaggcctttaccagaagcattaaccgagacaagcacttggcagtggcttacttccaacgagggatgctctactaccagacagagaaatatgatttggctatcaaagaccttaaagaagccttgattcagcttcgagggaaccagctgatagactataagatcctggggctccagttcaagctgtttgcctgtgaggtgttatataacattgctttcatgtatgccaagaaggaggaatggaaaaaagctgaagaacagttagcattggccacgagcatgaagtctgagcccagacattccaaaatcgacaaggcgatggagtgtgtctggaagcagaagctatatgagccagtggtgatccctgtgggcaggctgtttcgaccaaatgagagacaagtggctcagctggccaagaaggattacctaggcaaggcaacggtcgtggcatctgtggtggatcaagacagtttctctgggtttgcccctctgcaaccacaggcagctgagcctccacccagaccgaaaaccccagagatcttcagggctctggaaggggaggctcaccgtgtgctatttgggtttgtgcctgagacaaaagaagagctccaggtcatgccagggaacattgtctttgtcttgaagaagggcaatgataactgggccacggtcatgttcaacgggcagaaggggcttgttccctgcaactaccttgaaccagttgagctgcggatccaccctcagcagcagccccaggaggaaagctctccgcagtccgacatcccagctcctcctagttccaaagcccctggaagaccccagctgtcaccaggccagaaacaaaaagaagagcctaaggaagtgaagctcagtgttcccatgccctacacactcaaggtgcactacaagtacacggtagtcatgaagactcagcccgggctcccctacagccaggtccgggacatggtgtctaagaaactggagctccggctggaacaaactaagctgagctatcggcctcgggacagcaatgagctggtgcccctttcagaagacagcatgaaggatgcctggggccaggtgaaaaactactgcctgactctgtggtgtgagaacacagtgggtgaccaaggctttccagatgaacccaaggaaagtgaaaaagctgatgctaataaccagacaacagaacctcagcttaagaaaggcagccaagtggaggcactcttcagttatgaggctacccaaccagaggacctggagtttcaggaaggggatataatcctggtgttatcaaaggtgaatgaagaatggctggaaggggagtgcaaagggaaggtgggcattttccccaaagtttttgttgaagactgcgcaactacagatttggaaagcactcggagagaagtctaggatgtttcacaaactacaaagctgaagaaaatgaagccctattacttgtttgtaagatttagcacccttctgctgtatactgtactgagacattacagtttggaagtgttaactatttattccctgttaaaatttaacctactagacaatgatgtgagtacccaggatgatttcctggggcacagtgggtgaggagatggggacaggtgaatggaggagttaggggagaggaaaagtggatggaagtgtctggaaagggcacgagagagtcttccaggtactgatcctgtttcttgctctgagtgctagctagccagctgtgttcacactgtaaacattcatcaagctgtacatttggtgcacttttctgtgtcataccacaaaaaaaaaaaaaaaaaa

SEQ ID NO: 228 - DNA, 2067 bp, Homo sapiens
  misc_feature: oxidised low density lipoprotein (lectin-like) receptor 1
agttcgtgactgcttcactctctcattcttaggcttgaatttggaaatgacttttgatgacctaaagatccagactgtgaaggaccagcctgatgagaagtcaaatggaaaaaaagctaaaggtcttcagtttctttactctccatggtggtgcctggctgctgcgactctaggggtcctttgcctgggattagtagtgaccattatggtgctgggcatgcaattatcccaggtgtctgacctcctaacacaagagcaagcaaacctaactcaccagaaaaagaaactggagggacagatctcagcccggcaacaagcagaagaagcttcacaggagtcagaaaacgaactcaaggaaatgatagaaacccttgctcggaagctgaatgagaaatccaaagagcaaatggaacttcaccaccagaatctgaatctccaagaaacactgaagagagtagcaaattgttcagctccttgtccgcaagactggatctggcatggagaaaactgttacctattttcctcgggctcatttaactgggaaaagagccaagagaagtgcttgtctttggatgccaagttgctgaaaattaatagcacagctgatctggacttcatccagcaagcaatttcctattccagttttccattctggatggggctgtctcggaggaaccccagctacccatggctctgggaggacggttctcctttgatgccccacttatttagagtccgaggcgctgtctcccagacatacccttcaggtacctgtgcatatatacaacgaggagctgtttatgcggaaaactgcattttagctgccttcagtatatgtcagaagaaggcaaacctaagagcacagtgaatttgaaggctctggaagaaaagaaaaaagtctttgagttttattctggaatttaagctattctttgtcacttgggtgccaaacatgagagcccagaaaactgtcatttagctggctgcagaactcctttgcagaaactggggttccaggtgcctggcacctttatgtcaacatttttgattctagcaacctgtattatttcacctagcttgtcccaagcttccctgccagcctgaagtccattttcccctttttattttaaaatttgactcctcttcaagcttgaaaaccctctgaactcagtcttctttacctcattatcaccttcccctcacactcctaaaattgcatgaaagacagaacatggagaacttgctcaagtgcaggcagagagcaaaaaggggaaatatgtctgggaaaaagtgcacgtgaagaaacaaagaaggacagaggccattccgaaatcaagaaactcatgttcttaactttaaaaaaggtatcaatccttggtttttaaactgtggtccatctccagactctaccacttacggacagacagacagacagacacacacacacacacacacacacacattttgggacaagtggggagcccaagaaagtaattagtaagtgagtggtcttttctgtaagctaatccacaacctgttaccacttcctgaatcagttattatttcttcatttttttttctaccagaggacagattaatagatttaacccttcacaacagttcttgttagaatcatgggatgtgtggcccagaggtaagaatagaatttctttccctaaagaacataccttttgtagatgaactcttctcaactctgttttgctatgctataattccgaaacatacaagacaaaaaaaatgaagacactcaatttagaacaaactaagccaggtatgcaaatatcgctgaatagaaacagatggaattagaaatatatcttctatttttaggcttctatttcctttccacccactcttcacaggctattttactttaaaggaagcctttttattttgctgcacacaatctagcaggaatctttttttttttttaagagctgtgtcatccttatgtaggcaagagatgtttgcttttgttaaaagctttattgagatataattaacataaaataaactgaacatatttaaaaaaaaaaaaaaaaaaaa

SEQ ID NO: 229 - DNA, 3171 bp, Homo sapiens
  misc_feature: TPX2, microtubule-associated protein homolog (Xenopus laevis)
gaattcgcggccgcgtcgaccagatctgaggcgaggctaggtgagccgtgggaagaaaagagggagcagctagggcgcgggtctccctcctcccggagtttggaacggctgaagttcaccttccagcccctagcgccgttcgcgccgctaggcctggcttctgaggcggttgcggtgctcggtcgccgcctaggcggggcagggtgcgagcaggggcttcgggccacgcttctcttggcgacaggattttgctgtgaagtccgtccgggaaacggaggaaaaaaagagttgcgggaggctgtcggctaataacggttcttgatacatatttgccagacttcaagatttcagaaaaggggtgaaagagaagattgcaactttgagtcagacctgtaggcctgatagactgattaaaccacagaaggtgacctgctgagaaaagtggtacaaatactgggaaaaacctgctcttctgcgttaagtgggagacaatgtcacaagttaaaagctcttattcctatgatgccccctcggatttcatcaatttttcatccttggatgatgaaggagatactcaaaacatagattcatggtttgaggagaaggccaatttggagaataagttactggggaagaatggaactggagggctttttcagggcaaaactcctttgagaaaggctaatcttcagcaagctattgtcacacctttgaaaccagttgacaacacttactacaaagaggcagaaaaagaaaatcttgtggaacaatccattccgtcaaatgcttgttcttccctggaagttgaggcagccatatcaagaaaaactccagcccagcctcagagaagatctcttaggctttctgctcagaaggatttggaacagaaagaaaagcatcatgtaaaaatgaaagccaagagatgtgccactcctgtaatcatcgatgaaattctaccctctaagaaaatgaaagtttctaacaacaaaaagaagccagaggaagaaggcagtgctcatcaagatactgctgaaaagaatgcatcttccccagagaaagccaagggtagacatactgtgccttgtatgccacctgcaaagcagaagtttctaaaaagtactgaggagcaagagctggagaagagtatgaaaatgcagcaagaggtggtggagatgcggaaaaagaatgaagaattcaagaaacttgctctggctggaatagggcaacctgtgaagaaatcagtgagccaggtcaccaaatcagttgacttccacttccgcacagatgagcgaatcaaacaacatcctaagaaccaggaggaatataaggaagtgaactttacatctgaactacgaaagcatccttcatctcctgcccgagtgactaagggatgtaccattgttaagcctttcaacctgtcccaaggaaagaaaagaacatttgatgaaacagtttctacatatgtgccccttgcacagcaagttgaagacttccataaacgaacccctaacagatatcatttgaggagcaagaaggatgatattaacctgttaccctccaaatcttctgtgaccaagatttgcagagacccacagactcctgtactgcaaaccaaacaccgtgcacgggctgtgacctgcaaaagtacagcagagctggaggctgaggagctcgagaaattgcaacaatacaaattcaaagcacgtgaacttgatcccagaatacttgaaggtgggcccatcttgcccaagaaaccacctgtgaaaccacccaccgagcctattggctttgatttggaaattgagaaaagaatccaggagcgagaatcaaagaagaaaacagaggatgaacactttgaatttcattccagaccttgccctactaagattttggaagatgttgtgggtgttcctgaaaagaaggtacttccaatcaccgtccccaagtcaccagcctttgcattgaagaacagaattcgaatgcccaccaaagaagatgaggaagaggacgaaccggtagtgataaaagctcaacctgtgccacattatggggtgccttttaagccccaaatcccagaggcaagaactgtggaaatatgccctttctcctttgattctcgagacaaagaacgtcagttacagaaggagaagaaaataaaagaactgcagaaaggggaggtgcccaagttcaaggcacttcccttgcctcattttgacaccattaacctgccagagaagaaggtaaagaatgtgacccagattgaacctttctgcttggagactgacagaagaggtgctctgaaggcacagacttggaagcaccagctggaagaagaactgagacagcagaaagaagcagcttgtttcaaggctcgtccaaacaccgtcatctctcaggagccctttgttcccaagaaagagaagaaatcagttgctgagggcctttctggttctctagttcaggaaccttttcagctggctactgagaagagagccaaagagcggcaggagctggagaagagaatggctgaggtagaagcccagaaagcccagcagttggaggaggccagactacaggaggaagagcagaaaaaagaggagctggccaggctacggagagaactggtgcataaggcaaatccaatacgcaagtaccagggtctggagataaagtcaagtgaccagcctctgactgtgcctgtatctcccaaattctccactcgattccactgctaaactcagctgtgagctgcggataccgcccggcaatgggacctgctcttaacctcaaacctaggaccgtcttgctttgtcattgggcatggagagaacccatttctccagacttttacctacccgtgcctgagaaagcatacttgacaactgtggactccagttttgttgagaattgttttcttacattactaaggctaataatgagatgtaactcatgaatgtctcgattagactccatgtagttacttcctttaaaccatcagccggccttttatatgggtcttcactctgactagaatttagtctctgtgtcagcacagtgtaatctctattgctattgccccttacgactctcaccctctccccactttttttaaaaattttaaccagaaaataaagatagttaaatcctggaaaaaaaaaaaaaaaaaaaaaa

SEQ ID NO: 230 - DNA, 2879 bp, Homo sapiens
  misc_feature: leukocyte immunoglobulin-like receptor, subfamily B (with TM and ITIM domains), member 2 /// leukocyte immunoglobulin-like receptor, subfamily B (with TM and ITIM domains), member 6
aaaaagctatttaggtgacactatagaaggtacgcctgcaggtaaccggtccggaattcccgggtcgacccacgcgtccgggggaagccactgctaccctcatcaggaagggcagacacaagaagcaccagttctatttgctgctacatcccggctctcgcaccgagggctcatccatccgcagagcagggcagtgggaggagacgccatgacccccatcgtcacagtcctgatctgtctcgggctgagtctgggccccaggacccgcgtgcagacagggaccatccccaagcccaccctgtgggctgagccagactctgtgatcacccaggggagtcccgtcaccctcagttgtcaggggagccttgaagcccaggagtaccgtctatatagggagaaaaaatcagcatcttggattacacggatacgaccagagcttgtgaagaacggccagttccacatcccatccatcacctgggaacacacagggcgatatggctgtcagtattacagccgcgctcggtggtctgagctcagtgaccccctggtgctggtgatgacaggagcctacccaaaacccaccctctcagcccagcccagccctgtggtgacctcaggaggaagggtgaccctccagtgtgagtcacaggtggcatttggcggcttcattctgtgtaaggaaggagaagatgaacacccacaatgcctgaactcccagccccatgcccgtgggtcgtcccgcgccatcttctccgtgggccccgtgagcccgaatcgcaggtggtcgcacaggtgctatggttatgacttgaactctccctatgtgtggtcttcacccagtgatctcctggagctcctggtcccaggtgtttctaagaagccatcactctcagtgcagccgggtcctgtcatggcccctggggaaagcctgaccctccagtgtgtctctgatgtcggctatgacagatttgttctgtacaaggagggggaacgtgaccttcgccagctccctggccggcagccccaggctgggctctcccaggccaacttcaccctgggccctgtgagccgctcctacgggggccagtacagatgctacggtgcacacaacctctcctctgagtgctcggcccccagcgaccccctggacatcctgatcacaggacagatccgtggcacacccttcatctcagtgcagccaggccccacagtggcctcaggagagaacgtgaccctgctgtgtcagtcatggcggcagttccacactttccttctgaccaaggcgggagcagctgatgccccactccgtctaagatcaatacacgaatatcctaagtaccaggctgaattccccatgagtcctgtgacctcagcccacgcggggacctacaggtgctacggctcactcaactccgacccctacctgctgtctcaccccagtgagcccctggagctcgtggtctcaggaccctccatgggttccagccccccacccaccggtcccatctccacacctggccctgaggaccagcccctcacccccactgggtcggatccccaaagtggtctgggaaggcacctgggggttgtgatcggcatcttggtggccgtcgtcctactgctcctcctcctcctcctcctcttcctcatcctccgacatcgacgtcagggcaaacactggacatcgacccagagaaaggctgatttccaacatcctgcaggggctgtggggccagagcccacagacagaggcctgcagtggaggtccagcccagctgccgacgcccaggaagaaaacctctatgctgccgtgaaggacacacagcctgaagatggggtggagatggacactcgggctgctgcatctgaagccccccaggatgtgacctacgcccagctgcacagcttgaccctcagacggaaggcaactgagcctcctccatcccaggaaagggaacctccagctgagcccagcatctacgccaccctggccatccactagcccggagggtacgcagactccacactcagtagaaggagactcaggactgctgaaggcacgggagctgcccccagtggacaccaatgaaccccagtcagcctggacccctaacaaagaccatgaggagatgctgggaactttgggactcacttgattctgcagtcgaaataactaatatccctacattttttaattaaagcaacagacttctcaataatcaatgagttaaccgagaaaactaaaatcagaagtaagaatgtgctttaaactgaatcacaatataaatattacacatcacacaatgaaattgaaaaagtacaaaccacaaatgaaaaaagtagaaacgaaaaaaaaaaactaggaaatgaatgacgttggctttcgtataaggaatttagaaaaagaataaccaattattccaaatgaaggtgtaagaaagggaataagaagaagaagagttgctcatgaggaaaaaccaaaacttgaaaattcaacaaagccaatgaagctcattcttgaaaatattaattacagtcataaatcctaactacattgagcaagagaaagaaagagcaggcacgcatttccatatgggagtgagccagcagacagcccagcagatcctacacacattttcacaaactaaccccagaacaggctgcaaacctataccaatatactagaaaatgcagattaaatggatgaaatattcaaaactggagtttacataatgaacgtaagagtaatcagagaatctgactcattttaaatgtgtgtgtatgtgtgtgtatatatatgtgtgtgtgtgtgtgtgtgtgtgtgtgtgaaaaacattgactgtaataaaaatgttcccatcgtaaaaaaaaaaaaaaaa

SEQ ID NO: 231 - DNA, 1396 bp, Homo sapiens
  misc_feature: leukocyte immunoglobulin-like receptor, subfamily B (with TM and ITIM domains), member 4
atgatccccaccttcacggctctgctctgcctcgggctgagtctgggccccaggacccacatgcaggcagggcccctccccaaacccaccctctgggctgagccaggctctgtgatcagctgggggaactctgtgaccatctggtgtcaggggaccctggaggctcgggagtaccgtctggataaagaggaaagcccagcaccctgggacagacagaacccactggagcccaagaacaaggccagattctccatcccatccatgacagaggactatgcagggagataccgctgttactatcgcagccctgtaggctggtcacagcccagtgaccccctggagctggtgatgacaggagcctacagtaaacccaccctttcagccctgccgagtcctcttgtgacctcaggaaagagcgtgaccctgctgtgtcagtcacggagcccaatggacactttccttctgatcaaggagcgggcagcccatcccctactgcatctgagatcagagcacggagctcagcagcaccaggctgaattccccatgagtcctgtgacctcagtgcacggggggacctacaggtgcttcagctcacacggcttctcccactacctgctgtcacaccccagtgaccccctggagctcatagtctcaggatccttggagggtcccaggccctcacccacaaggtccgtctcaacagctgcaggccctgaggaccagcccctcatgcctacagggtcagtcccccacagtggtctgagaaggcactgggaggtactgatcggggtcttggtggtctccatcctgcttctctccctcctcctcttcctcctcctccaacactggcgtcagggaaaacacaggacattggcccagagacaggctgatttccaacgtcctccaggggctgccgagccagagcccaaggacgggggcctacagaggaggtccagcccagctgctgacgtccagggagaaaacttctgtgctgccgtgaagaacacacagcctgaggacggggtggaaatggacactcggagcccacacgatgaagacccccaggcagtgacgtatgccaaggtgaaacactccagacctaggagagaaatggcctctcctccctccccactgtctggggaattcctggacacaaaggacagacaggcagaagaggacagacagatggacactgaggctgctgcatctgaagccccccaggatgtgacctacgcccagctgcacagctttaccctcagacagaaggcaactgagcctcctccatcccaggaaggggcctctccagctgagcccagtgtctatgccactctggccatccactaatccaggggggacccagaccccacaagccatggagactcaggaccccagaagg

SEQ ID NO: 232 - DNA, 4654 bp, Homo sapiens
  misc_feature: integrin, alpha X (antigen CD11C (p150), alpha polypeptide)
gaattcctgccactcttcctgcaacggcccaggagctcagagctccacatctgaccttctagtcatgaccaggaccagggcagcactcctcctgttcacagccttagcaacttctctaggtttcaacttggacacagaggagctgacagccttccgtgtggacagcgctgggtttggagacagcgtggtccagtatgccaactcctgggtggtggttggagccccccaaaagataacagctgccaaccaaacgggtggcctctaccagtgtggctacagcactggtgcctgtgagcccatcggcctgcaggtgcccccggaggccgtgaacatgtccctgggcctgtccctggcgtctaccaccagcccttcccagctgctggcctgcggccccaccgtgcaccacgagtgcgggaggaacatgtacctcaccggactctgcttcctcctgggccccacccagctcacccagaggctcccggtgtccaggcaggagtgcccaagacaggagcaggacattgtgttcctgatcgatggctcaggcagcatctcctcccgcaactttgccacgatgatgaacttcgtgagagctgtgataagccagttccagagacccagcacccagttttccctgatgcagttctccaacaaattccaaacacacttcactttcgaggaattcaggcgcacgtcaaaccccctcagcctgttggcttctgttcaccagctgcaagggtttacatacacggccaccgccatccaaaatgtcgtgcaccgattgttccatgcctcatatggggcccgtagggatgccaccaaaattctcattgtcatcactgatgggaagaaagaaggcgacagcctggattataaggatgtcatccccatggctgatgcagcaggcatcatccgctatgcaattggggttggattagcttttcaaaacagaaattcttggaaagaattaaatgacattgcatcgaagccctcccaggaacacatatttaaagtggaggactttgatgctctgaaagatattcaaaaccaactgaaggagaagatctttgccattgagggtacggagaccacaagcagtagctccttcgaattggagatggcacaggagggcttcagcgctgtgttcacacctgatggccccgttctgggggctgtggggagcttcacctggtctggaggtgccttcctgtaccccccaaatatgagccctaccttcatcaacatgtctcaggagaatgtggacatgagggactcttacctgggttactccaccgagctggccctctggaaaggggtgcagagcctggtcctgggggccccccgctaccagcacaccgggaaggctgtcatcttcacccaggtgtccaggcaatggaggatgaaggccgaagtcacggggactcagatcggctcctacttcggggcctccctctgctccgtggacgtagacaccgacggcagcaccgacctggtcctcatcggggccccccattactacgagcagacccgagggggccaggtgtctgtgtgtcccttgcccagggggtggagaaggtggtggtgtgatgctgttctctacggggagcagggccacccctggggtcgctttggggcggctctgacagtgctgggggatgtgaatggggacaagctgacagacgtggtcatcggggccccaggagaggaggagaaccggggtgctgtctacctgtttcacggagtcttgggacccagcatcagcccctcccacagccagcggatcgcgggctcccagctctcctccaggctgcagtattttgggcaggcactgagcgggggtcaagacctcacccaggatggactggtggacctggctgtgggggcccggggccaggtgctcctgctcaggaccagacctgtgctctgggtgggggtgagcatgcagttcatacctgccgagatccccaggtctgcgtttgagtgtcgggagcaggtggtctctgagcagaccctggtacagtccaacatctgcctttacattgacaaacgttctaagaacctgcttgggagccgtgacctccaaagctctgtgaccttggacctggccctcgaccctggccgcctgagtccccgtgccaccttccaggaaacaaagaaccggagtctgagccgagtccgagtcctcgggctgaaggcacactgtgaaaacttcaacctgctgctcccgagctgcgtggaggactctgtgacccccattaccttgcgtctgaacttcacgctggtgggcaagcccctccttgccttcagaaacctgcggcctatgctggccgcactggctcagagatacttcacggcctccctaccctttgagaagaactgtggagccgaccatatctgccaggacaatctcggcatctccttcagcttcccaggcttgaagtccctgctggtggggagtaacctggagctgaacgcagaagtgatggtgtggaatgacggggaagactcctacggaaccaccatcaccttctcccaccccgcaggactgtcctaccgctacgtggcagagggccagaaacaagggcagctgcgttccctgcacctgacatgtgacagcgccccagttgggagccagggcacctggagcaccagctgcagaatcaaccacctcatcttccgtggcggcgcccagatcaccttcttggctacctttgacgtctcccccaaggctgtcctgggagaccggctgcttctgacagccaatgtgagcagtgagaacaacactcccaggaccagcaagaccaccttccagctggagctcccggtgaagtatgctgtctacactgtggttagcagccacgaacaattcaccaaatacctcaacttctcagagtctgaggagaaggaaagccatgtggccatgcacagataccaggtcaataacctgggacagagggacctgcctgtcagcatcaacttctgggtgcctgtggagctgaaccaggaggctgtgtggatggatgtggaggtctcccacccccagaacccatcccttcggtgctcctcagagaaaatcgcacccccagcatctgacttcctggcgcacattcagaagaatcccgtgctggactgctccattgctggctgcctgcggttccgctgtgacgtcccctccttcagcgtccaggaggagctggatttcaccctgaagggcaacctcagctttggctgggtccgccagatattgcagaagaaggtgtcggtcgtgagtgtggctgaaattacgttcgacacatccgtgtactcccagcttccaggacaggaggcatttatgagagctcagacgacaacggtgctggagaagtacaaggtccacaaccccacccccctcatcgtaggcagctccattgggggtctgttgctgctggcactcatcacagcggtactgtacaaagttggcttcttcaagcgtcagtacaaggaaatgatggaggaggcaaatggacaaattgccccagaaaacgggacacagacccccagcccgcccagtgagaaatgatccctctttgccttggacttcttctcccgcgattttccccacttacttaccctcacctgtcaggctgacggggaggaaccactgcaccaccgagagaggctgggatgggcctgcttcctgtctttgggagaaaacgtcttgcttgggaaggggcctttgtcttgtcaaggttccaactggaaacccttaggacagggtccctgctgtgttccccaaaaggacttgacttgcaatttctacctagaaatacatggacaatacccccaggcctcagtctcccttctcccatgaggcacgaatgatctttctttcctttccttttttttttttttcttttctttttttttttttttgagacggagtctcgctctgtcacccaggctggagtgcaatggcgtgatctcggctcgctgcaacctccgcctcccgggttcaagtaattctgctgtctcagcctcctgcgtagctgggactacaggcacacgccacctcgcccggcccgatctttctaaaatacagttctgaatatgctgctcatccccacctgtcttcaacagctccccattaccctcaggacaatgtctgaactctccagcttcgcgtgagaagtccccttccatcccagagggtgggcttcagggcgcacagcatgagagcctctgtgcccccatcaccctcgtttccagtgaattagtgtcatgtcagcatcagctcagggcttcatcgtggggctctcagttccgattccccaggctgaattgggagtgagatgcctgcatgctgggttctgcacagctggcctcccgcggttgggtcaacattgctggcctggaagggaggagcgccctctagggagggacatggccccggtgcggctgcagctcaccagccccaggggcagaagagacccaaccacttcctattttttgaggctatgaatatagtacctgaaaaaatgccaagcactagattatttttttaaaaagcgtactttaaatgtttgtgttaatacacattaaaacatcgcacaaaaacgatgcatctaccgctccttgggaaataatctgaaaggtctaaaaataaaaaagccttctgtgg

SEQ ID NO: 233 - DNA, 1000 bp, Homo sapiens
  misc_feature: syntaxin 11
gaattcgcggccgcgtcgacctcggttcgcactctcgctcccagtccaggcaaaatgaaagaccggctagcagaacttctggacttgtccaagcaatatgaccagcagttcccagacggggacgatgagtttgactcgccccacgaggacatcgtgttcgagacggaccacatcctggagtccctgtaccgagacatccgggacattcaggatgaaaaccagctgctggtggccgacgtgaagcggctgggaaagcagaacgcccgcttcctcacgtccatgcggcgcctcagcagcatcaagcgcgacaccaactccatcgccaaggccatcaaggcccggggcgaggtcatccactgcaagctgcgcgccatgaaggagctgagcgaggcggctgaggcccagcacggcccgcactcggcagtggcgcgcatttcgcgggcgcagtacaacgcgctcaccctcaccttccagcgcgccatgcacgactacaaccaggccgagatgaagcagcgcgacaactgcaagatccgcatccagcgccagctggagatcatgggcaaggaagtctcgggcgaccagatcgaggacatgttcgagcagggtaagtgggacgtgttttccgagaacttgctggccgacgtgaagggcgcgcgggccgccctcaacgagatcgagagccgccaccgcgaactgctgcgcctggagagccgcatccgcgacgtacacgagctcttcttgcagatggcggtgctggtggagaagcaggccgacaccctgaacgtcatcgagctcaacgtacaaaagacggtcgactacaccggccaggccaaggcgcaggtgcggaaggccgtgcagtacgaggagaagaacccctgccggaccctctgctgcttctgctgtccctgcctcaagtagcaggccggcccgggccgccaccgcccatcccaaaccatggagcgcgctgggaaggacgcaccaaagccgggagctctgccct

SEQ ID NO: 234 - DNA, 2877 bp, Homo sapiens
  misc_feature: transferrin receptor 2
ctgcaggcttcaggaggggacacaagcatggagcggctttggggtctattccagagagcgcaacaactgtccccaagatcctctcagaccgtctaccagcgtgtggaaggcccccggaaagggcacctggaggaggaagaggaagacggggaggagggggcggagacattggcccacttctgccccatggagctgaggggccctgagcccctgggctctagacccaggcagccaaacctcattccctgggcggcagcaggacggagggctgccccctacctggtcctgacggccctgctgatcttcactggggccttcctactgggctacgtcgccttccgagggtcctgccaggcgtgcggagactctgtgttggtggtcagtgaggatgtcaactatgagcctgacctggatttccaccagggcagactctactggagcgacctccaggccatgttcctgcagttcctgggggaggggcgcctggaggacaccatcaggcaaaccagccttcgggaacgggtggcaggctcggccgggatggccgctctgactcaggacattcgcgcggcgctctcccgccagaagctggaccacgtgtggaccgacacgcactacgtggggctgcaattcccggatccggctcaccccaacaccctgcactgggtcgatgaggccgggaaggtcggagagcagctgccgctggaggaccctgacgtctactgcccctacagcgccatcggcaacgtcacgggagagctggtgtacgcccactacgggcggcccgaagacctgcaggacctgcgggccaggggcgtggatccagtgggccgcctgctgctggtgcgcgtgggggtgatcagcttcgcccagaaggtgaccaatgctcaggacttcggggctcaaggagtgctcatatacccagagccagcggacttctcccaggacccacccaagccaagcctgtccagccagcaggcagtgtatggacatgtgcacctgggaactggagacccctacacacctggcttcccttccttcaatcaaacccagttccctccagttgcatcatcaggccttcccagcatcccagcccagcccatcagtgcagacattgcctcccgcctgctgaggaagctcaaaggccctgtggccccccaagaatggcaggggagcctcctaggctccccttatcacctgggccccgggccacgactgcggctagtggtcaacaatcacaggacctccacccccatcaacaacatcttcggctgcatcgaaggccgctcagagccagatcactacgttgtcatcggggcccagagggatgcatggggcccaggagcagctaaatccgctgtggggacggctatactcctggagctggtgcggaccttttcctccatggtgagcaacggcttccggccccgcagaagtctcctcttcatcagctgggacggtggtgactttggaagcgtgggctccacggagtggctagaaggctacctcagcgtgctgcacctcaaagccgtagtgtacgtgagcctggacaacgcagtgctgggggatgacaagtttcatgccaagaccagcccccttctgacaagtctcattgagagtgtcctgaagcaggtggattctcccaaccacagtgggcagactctctatgaacaggtggtgttcaccaatcccagctgggatgctgaggtgatccggcccctacccatggacagcagtgcctattccttcacggcctttgtgggagtccctgccgtcgagttctcctttatggaggacgaccaggcctacccattcctgcacacaaaggaggacacttatgagaacctgcataaggtgctgcaaggccgcctgcccgccgtggcccaggccgtggcccagctcgcagggcagctcctcatccggctcagccacgatcgcctgctgcccctcgacttcggccgctacggggacgtcgtcctcaggcacatcgggaacctcaacgagttctctggggacctcaaggcccgcgggctgaccctgcagtgggtgtactcggcgcggggggactacatccgggcggcggaaaagctgcggcaggagatctacagctcggaggagagagacgagcgactgacacgcatgtacaacgtgcgcataatgcgggtggagttctacttcctttcccagtacgtgtcgccagccgactccccgttccgccacatcttcatgggccgtggagaccacacgctgggcgccctgctggaccacctgcggctgctgcgctccaacagctccgggacccccggggccacctcctccactggcttccaggagagccgtttccggcgtcagctagccctgctcacctggacgctgcaaggggcagccaatgcgcttagcggggatgtctggaacattgataacaacttctgaggccctggggatcctcacatccccgtcccccagtcaagagctcctctgctcctcgcttgaatgattcagggtcagggaggtggctcagagtccacctctcattgctgatcaatttctcattacccctacacatctctccacggagcccagaccccagcacagatatccacacaccccagccctgcagtgtagctgaccctaatgtgacggtcatactgtcggttaatcagagagtagcatcccttcaatcacagccccttcccctttctggggtcctccatacctagagaccactctgggaggtttgctaggccctgggacctggccagctctgttagtgggagagatcgctggcaccatagccttatggccaacaggtggtctgtggtgaaaggggcgtggagtttcaatatcaataaaccacctgatatcaataagccaaaa

SEQ ID NO: 235 - DNA, 1923 bp, Homo sapiens
  misc_feature: frizzled homolog 2 (Drosophila)
cgagtaaagtttgcaaagaggcgcgggaggcggcagccgcagcgaggaggcggcggggaagaagcgcagtctccgggttgggggcgggggcggggggggcgccaaggagccgggtggggggcggcggccagcatgcggccccgcagcgccctgccccgcctgctgctgccgctgctgctgctgcccgccgccgggccggcccagttccacggggagaagggcatctccatcccggaccacggcttctgccagcccatctccatcccgctgtgcacggacatcgcctacaaccagaccatcatgcccaaccttctgggccacacgaaccaggaggacgcaggcctagaggtgcaccagttctatccgctggtgaaggtgcagtgctcgcccgaactgcgcttcttcctgtgctccatgtacgcacccgtgtgcaccgtgctggaacaggccatcccgccgtgccgctctatctgtgagcgcgcgcgccagggctgcgaagccctcatgaacaagttcggttttcagtggcccgagcgcctgcgctgcgagcacttcccgcgccacggcgccgagcagatctgcgtcggccagaaccactccgaggacggagctcccgcgctactcaccaccgcgccgccgccgggactgcagccgggtgccgggggcaccccgggtggcccgggcggcggcggcgctcccccgcgctacgccacgctggagcaccccttccactgcccgcgcgtcctcaaggtgccatcctatctcagctacaagtttctgggcgagcgtgattgtgctgcgccctgcgaacctgcgcggcccgatggttccatgttcttctcacaggaggagacgcgtttcgcgcgcctctggatcctcacctggtcggtgctgtgctgcgcttccaccttcttcactgtcaccacgtacttggtagacatgcagcgcttccgctacccagagcggcctatcatttttctgtcgggctgctacaccatggtgtcggtggcctacatcgcgggcttcgtgctccaggagcgcgtggtgtgcaacgagcgcttctccgaggacggttaccgcacggtggtgcagggcaccaagaaggagggctgcaccatcctcttcatgatgctctacttcttcagcatggccagctccatctggtgggtcatcctgtcgctcacctggttcctggcagccggcatgaagtggggccacgaggccatcgaggccaactctcagtacttccacctggccgcctgggccgtgccggccgtcaagaccatcaccatcctggccatgggccagatcgacggcgacctgctgagcggcgtgtgcttcgtaggcctcaacagcctggacccgctgcggggcttcgtgctagcgccgctcttcgtgtacctgttcatcggcacgtccttcctcctggccggcttcgtgtcgctcttccgcatccgcaccatcatgaagcacgacggcaccaagaccgaaaagctggagcggctcatggtgcgcatcggcgtcttctccgtgctctacacagtgcccgccaccatcgtcatcgcttgctacttctacgagcaggccttccgcgagcactgggagcgctcgtgggtgagccagcactgcaagagcctggccatcccgtgcccggcgcactacacgccgcgcatgtcgcccgacttcacggtctacatgatcaaatacctcatgacgctcatcgtgggcatcacgtcgggcttctggatctggtcgggcaagacgctgcactcgtggaggaagttctacactcgcctcaccaacagccgacacggtgagaccaccgtgtgagggacgcccccaggccggaaccgcgcggcgctttcctccgcccggggtggggcccctacagactccgtattttatttttttaaataaaaaagc

SEQ ID NO: 236 - DNA, 2007 bp, Homo sapiens
  misc_feature: solute carrier family 11 (proton-coupled divalent metal ion transporters), member 1
tctgggcacgggtgcaggctgaggagctgcccagagcaccgctcacactcccagagtacctgaagtcggcatttcaatgacaggtgacaagggtccccaaaggctaagcgggtccagctatggttccatctccagcccgaccagcccgaccagcccagggccacagcaagcacctcccagagagacctacctgagtgagaagatccccatcccagacacaaaaccgggcaccttcagcctgcggaagctatgggccttcacggggcctggcttcctcatgagcattgctttcctggacccaggaaacatcgagtcagatcttcaggctggcgccgtggcgggattcaaacttctctgggtgctgctctgggccaccgtgttgggcttgctctgccagcgactggctgcacgtctgggcgtggtgacaggcaaggacttgggcgaggtctgccatctctactaccctaaggtgccccgcaccgtcctctggctgaccatcgagctagccattgtgggctccgacatgcaggaagtcatcggcacggccattgcattcaatctgctctcagctggacgaatcccactctggggtggcgtcctcatcaccatcgtggacaccttcttcttcctcttcctcgataactacgggctgcggaagctggaagctttttttggactccttataaccattatggccttgacctttggctatgagtatgtggtggcgcgtcctgagcagggagcgcttcttcggggcctgttcctgccctcgtgcccgggctgcggccaccccgagctgctgcaggcggtgggcattgttggcgccatcatcatgccccacaacatctacctgcactcggccctggtcaagtctcgagagatagaccgggcccgccgagcggacatcagagaagccaacatgtacttcctgattgaggccaccatcgccctgtccgtctcctttatcatcaacctctttgtcatggctgtctttgggcaggccttctaccagaaaaccaaccaggctgcgttcaacatctgtgccaacagcagcctccacgactacgccaagatcttccccatgaacaacgccaccgtggccgtggacatttaccaggggggcgtgatcctgggctgcctgttcggccccgcggccctctacatctgggccataggtctcctggcggctgggcagagctccaccatgacgggcacctacgcgggacagttcgtgatggagggcttcctgaggctgcggtggtcacgcttcgcccgtgtcctcctcacccgctcctgcgccatcctgcccaccgtgctcgtggctgtcttccgggacctgagggacttgtcgggcctcaatgatctgctcaacgtgctgcagagcctgctgctcccgttcgccgtgctgcccatcctcacgttcaccagcatgcccaccctcatgcaggagtttgccaatggcctgctgaacaaggtcgtcacctcttccatcatggtgctagtctgcgccatcaacctctacttcgtggtcagctatctgcccagcctgccccaccctgcctacttcggccttgcagccttgctggccgcagcctacctgggcctcagcacctacctggtctggacctgttgccttgcccacggagccacctttctggcccacagctcccaccaccacttcctgtatgggctccttgaagaggaccagaaaggggagacctctggctaggcccacaccagggcctggctgggagtggcatgtatgacgtgactggcctgctggatgtggagggggcgcgtgcaggcagcaggatagagtgggacagttcctgagaccagccaacctgggggctttagggacctgctgtttcctagcgcagccatgtgattaccctctgggtctcagtgtcctcatctgtaaaatggagacaccaccacccttgccatggaggttaagcactttaacacagtgtctggcacttgggacaaaaacaaacaaacgaaaaa

SEQ ID NO: 237 - DNA, 3166 bp, Homo sapiens
  misc_feature: vascular endothelial growth factor
aagagctccagagagaagtcgaggaagagagagacggggtcagagagagcgcgcgggcgtgcgagcagcgaaagcgacaggggcaaagtgagtgacctgcttttgggggtgaccgccggagcgcggcgtgagccctcccccttgggatcccgcagctgaccagtcgcgctgacggacagacagacagacaccgcccccagccccagttaccacctcctccccggccggcggcggacagtggacgcggcggcgagccgcgggcaggggccggagcccgcccccggaggcggggtggagggggtcggagctcgcggcgtcgcactgaaacttttcgtccaacttctgggctgttctcgcttcggaggagccgtggtccgcgcgggggaagccgagccgagcggagccgcgagaagtgctagctcgggccgggaggagccgcagccggaggagggggaggaggaagaagagaaggaagaggagagggggccgcagtggcgactcggcgctcggaagccgggctcatggacgggtgaggcggcggtgtgcgcagacagtgctccagcgcgcgcgctccccagccctggcccggcctcgggccgggaggaagagtagctcgccgaggcgccgaggagagcgggccgccccacagcccgagccggagagggacgcgagccgcgcgccccggtcgggcctccgaaaccatgaactttctgctgtcttgggtgcattggagccttgccttgctgctctacctccaccatgccaagtggtcccaggctgcacccatggcagaaggaggagggcagaatcatcacgaagtggtgaagttcatggatgtctatcagcgcagctactgccatccaatcgagaccctggtggacatcttccaggagtaccctgatgagatcgagtacatcttcaagccatcctgtgtgcccctgatgcgatgcgggggctgctccaatgacgagggcctggagtgtgtgcccactgaggagtccaacatcaccatgcagattatgcggatcaaacctcaccaaggccagcacataggagagatgagcttcctacagcacaacaaatgtgaatgcagaccaaagaaagatagagcaagacaagaaaatccctgtgggccttgctcagagcggagaaagcatttgtttgtacaagatccgcagacgtgtaaatgttcctgcaaaaacacacactcgcgttgcaaggcgaggcagcttgagttaaacgaacgtacttgcagatgtgacaagccgaggcggtgagccgggcaggaggaaggagcctccctcagggtttcgggaaccagatctctctccaggaaagactgatacagaacgatcgatacagaaaccacgctgccgccaccacaccatcaccatcgacagaacagtccttaatccagaaacctgaaatgaaggaagaggagactctgcgcagagcactttgggtccggagggcgagactccggcggaagcattcccgggcgggtgacccagcacggtccctcttggaattggattcgccattttatttttcttgctgctaaatcaccgagcccggaagattagagagttttatttctgggattcctgtagacacacccacccacatacatacatttatatatatatatattatatatatataaaaataaatatctctattttatatatataaaatatatatattctttttttaaattaacagtgctaatgttattggtgtcttcactggatgtatttgactgctgtggacttgagttgggaggggaatgttcccactcagatcctgacagggaagaggaggagatgagagactctggcatgatcttttttttgtcccacttggtggggccagggtcctctcccctgcccaagaatgtgcaaggccagggcatgggggcaaatatgacccagttttgggaacaccgacaaacccagccctggcgctgagcctctctaccccaggtcagacggacagaaagacaaatcacaggttccgggatgaggacaccggctctgaccaggagtttggggagcttcaggacattgctgtgctttggggattccctccacatgctgcacgcgcatctcgcccccaggggcactgcctggaagattcaggagcctgggcggccttcgcttactctcacctgcttctgagttgcccaggaggccactggcagatgtcccggcgaagagaagagacacattgttggaagaagcagcccatgacagcgccccttcctgggactcgccctcatcctcttcctgctccccttcctggggtgcagcctaaaaggacctatgtcctcacaccattgaaaccactagttctgtccccccaggaaacctggttgtgtgtgtgtgagtggttgaccttcctccatcccctggtccttcccttcccttcccgaggcacagagagacagggcaggatccacgtgcccattgtggaggcagagaaaagagaaagtgttttatatacggtacttatttaatatccctttttaattagaaattagaacagttaatttaattaaagagtagggttttttttcagtattcttggttaatatttaatttcaactatttatgagatgtatcttttgctctctcttgctctcttatttgtaccggtttttgtatataaaattcatgtttccaatctctctctccctgatcggtgacagtcactagcttatcttgaacagatatttaattttgctaacactcagctctgccctccccgatcccctggctccccagcacacattcctttgaaagagggtttcaatatacatctacatactatatatatattgggcaacttgtatttgtgtgtatatatatatatatatgtttatgtatatatgtgatcctgaaaaaataaacatcgctattctgttttttatatgttcaaaccaaacaagaaaaaatagagaattctacatactaaatctctctccttttttaattttaatatttgttatcatttatttattggtgctactgtttatccgtaataattgtggggaaaagatattaacatcacgtctttgtctctagtgcagtttttcgagatattccgtagtacatatttatttttaaacaacgacaaagaaatacagatatatcttaaaaaaaaaaaa

SEQ ID NO: 238 - DNA, 2091 bp, Homo sapiens
  misc_feature: leukocyte immunoglobulin-like receptor, subfamily B (with TM and ITIM domains), member 3
ccatgacgcccgccctcacagccctgctctgccttgggctgagtctgggccccaggacccgcgtgcaggcagggcccttccccaaacccaccctctgggctgagccaggctctgtgatcagctgggggagccccgtgaccatctggtgtcaggggagcctggaggcccaggagtaccgactggataaagagggaagcccagagcccttggacagaaataacccactggaacccaagaacaaggccagattctccatcccatccatgacagagcaccatgcggggagataccgctgccactattacagctctgcaggctggtcagagcccagcgaccccctggagctggtgatgacaggattctacaacaaacccaccctctcagccctgcccagccctgtggtggcctcaggggggaatatgaccctccgatgtggctcacagaagggatatcaccattttgttctgatgaaggaaggagaacaccagctcccccggaccctggactcacagcagctccacagtggggggttccaggccctgttccctgtgggccccgtgaaccccagccacaggtggaggttcacatgctattactattatatgaacaccccccgggtgtggtcccaccccagtgaccccctggagattctgccctcaggcgtgtctaggaagccctccctcctgaccctgcagggccctgtcctggcccctgggcagagcctgaccctccagtgtggctctgatgtcggctacgacagatttgttctgtataaggagggggaacgtgacttcctccagcgccctggccagcagccccaggctgggctctcccaggccaacttcaccctgggccctgtgagcccctccaatgggggccagtacaggtgctatggtgcacacaacctctcctccgagtggtcggcccccagcgaccccctgaacatcctgatggcaggacagatctatgacaccgtctccctgtcagcacagccgggccccacagtggcctcaggagagaacgtgaccctgctgtgtcagtcatggtggcagtttgacactttccttctgaccaaagaaggggcagcccatcccccactgcgtctgagatcaatgtacggagctcataagtaccaggctgaattccccatgagtcctgtgacctcagcccacgcggggacctacaggtgctacggctcacgcagctccaacccctacctgctgtctcaccccagtgagcccctggagctcgtggtctcaggacactctggaggctccagcctcccacccacagggccgccctccacacctggtctgggaagatacctggaggttttgattggggtctcggtggccttcgtcctgctgctcttcctcctcctcttcctcctcctccgacgtcagcgtcacagcaaacacaggacatcgggctgagactctgtccatcttcacccatgaccagagaaagactgatttccagcgtcctgcaggggctgcggagacagagcccaaggacaggggcctgctgaggaggtccagcccagctgctgacgtccaggaagaaaacctctatgctgccgtgaaggacacacagtctgaggacagggtggagctggacagtcagagcccacacgatgaagacccccaggcagtgacgtatgccccggtgaaacactccagtcctaggagagaaatggcctctcctccctcctcactgtctggggaattcctggacacaaaggacagacaggtggaagaggacaggcagatggacactgaggctgctgcatctgaagcctcccaggatgtgacctacgcccagctgcacagcttgacccttagacggaaggcaactgagcctcctccatcccaggaaggggaacctccagctgagcccagcatctacgccactctggccatccactagcccggggggtacgcagaccccacactcagcagaaggagactcaggactgctgaaggcacgggagctgcccccagtggacaccagtgaaccccagtcagcctggacccctaacacagaccatgaggagacgctgggaacttgtgggactcacctgactcaaagatg

SEQ ID NO: 239 - DNA, 1466 bp, Homo sapiens
  misc_feature: Fc fragment of IgG, low affinity IIb, receptor (CD32)
gccctctagggtagaatcgccaagctttgagagaaggctgtgactgctgtgctctgggcgccagctcgctccagggagtgatgggaatcctgtcattcttacctgtccttgccactgagagtgactgggctgactgcaagtccccccagccttggggtcatatgcttctgtggacagctgtgctattcctggcagctcccccaaaggctgtgctgaaactcgagccccagtggatcaacgtgctccaggaggactctgtgactctgacatgccgggggactcacagccctgagagcgactccattcagtggttccacaatgggaatctcattcccacccacacgcagcccagctacaggttcaaggccaacaacaatgacagcggggagtacacgtgccagactggccagaccagcctcagcgaccctgtgcatctgactgtgctttctgagtggctggtgctccagacccctcacctggagttccaggagggagaaaccatcgtgctgaggtgccacagctggaaggacaagcctctggtcaaggtcacattcttccagaatggaaaatccaagaaattttcccgttcggatcccaacttctccatcccacaagcaaaccacagtcacagtggtgattaccactgcacaggaaacataggctacacgctgttctcatccaagcctgtgaccatcactgtccaagctcccagctcttcaccgatggggatcattgtggctgtggtcactgggattgctgtagcggccattgttgctgctgtagtggccttgatctactgcaggaaaaagcggatttcagctctcccaggataccctgagtgcagggaaatgggagagaccctccctgagaaaccagccaatcccactaatcctgatgaggctgacaaagttggggctgagaacacaatcacctattcacttctcatgcacccggatgctctggaagagcctgatgaccagaaccgtatttagtctccattgtcttgcattgggatttgagaagaaaatcagagagggaagatctggtatttcctggcctaaattccccttggaggacagggagatgctcgagttccaaaagagaaggtttcttccagagtcatctacctgagtcctgaagctccctgtcctgaaagccacagacaatatggtcccaaataaccgactgcacctgctgtcttcagctcttcttgacatcaaggctcttccgttccacatccacacagccaatccaattaatcaaaccactgttattaacagataatagcaacttgggaaatgcttatgttacaggttaccgttgagaacaatcatctaaatctatatgatttcagaaatgttaaaatagactaacctctaccagcacattaaaagtgattgtttctgggtgatttattgatgatttttattttctttatttttctataaagatcatatattactttt

SEQ ID NO: 240 - DNA, 2018 bp, Homo sapiens
  misc_feature: leukocyte immunoglobulin-like receptor, subfamily B (with TM and ITIM domains), member 1
atgacccccatcctcacggtcctgatctgtctcgggctgagtctgggccccaggacccacgtgcaggcagggcacctccccaagcccaccctctgggctgaaccaggctctgtgatcacccaggggagtcctgtgaccctcaggtgtcaggggggccaggagacccaggagtaccgtctatatagagaaaagaaaacagcactctggattacacggatcccacaggagcttgtgaagaagggccagttccccatcccatccatcacctgggaacatgcagggcggtatcgctgttactatggtagcgacactgcaggccgctcagagagcagtgaccccctggagctggtggtgacaggagcctacatcaaacccaccctctcagcccagcccagccccgtggtgaactcaggagggaatgtaatcctccagtgtgactcacaggtggcatttgatggcttcagtctgtgtaaggaaggagaagatgaacacccacaatgcctgaactcccagccccatgcccgtgggtcgtcccgcgccatcttctccgtgggccccgtgagcccgagtcgcaggtggtggtacaggtgctatgcttatgactcgaactctccctatgagtggtctctacccagtgatctcctggagctcctggtcctaggtgtttctaagaagccatcactctcagtgcagccaggtcctatcgtggcccctgaggagaccctgactctgcagtgtggctctgatgctggctacaacagatttgttctgtataaggacggggaacgtgacttccttcagctcgctggcgcacagccccaggctgggctctcccaggccaacttcaccctgggccctgtgagccgctcctacgggggccagtacagatgctacggtgcacacaacctctcctccgagtggtcggcccccagtgaccccctggacatcctgatcgcaggacagttctatgacagagtctccctctcggtgcagccgggccccacggtggcctcaggagagaacgtgaccctgctgtgtcagtcacagggatggatgcaaactttccttctgaccaaggagggggcagctgatgacccatggcgtctaagatcaacgtaccaatctcaaaaataccaggctgaattccccatgggtcctgtgacctcagcccatgcggggacctacaggtgctacggctcacagagctccaaaccctacctgctgactcaccccagtgaccccctggagctcgtggtctcaggaccgtctgggggccccagctccccgacaacaggccccacctccacatctggccctgaggaccagcccctcacccccaccaggtcggatccccagagtggtctgggaaggcacgtgggggttgtgatcggcatcttggtggccgtcgtcctactgctcctcctcctcctcctcctcttcctcatcctccgacatcgacgtcagggcaaacactggacatcgagtccagcccagctgccgatgcccaggaagaaaacctctatgctgccgtgaagcacacacagcctgaggatggggtggagatggacactcggagcccacacgatgaagacccccaggcagtgacgtatgccgaggtgaaacactccagacctaggagagaaatggcctctcctccttccccactgtctggggaattcctggacacaaaggacagacaggcggaagaggacaggcagatggacactgaggctgctgcatctgaagccccccaggatgtgacctacgcccagctgcacagcttgacccttagacggaaggcaactgagcctcctccatcccaggaagggccctctccagctgtgcccagcatctacgccactctggccatccactagcccagggggggacgcagaccccacactccatggagtctggaatgcatgggagctgcccccccagtggacaccattggaccccacccagcctggatctaccccaggagactctgggaacttttaggggtcactcaattctgc

SEQ ID NO: 241 - DNA, 2401 bp, Homo sapiens
  misc_feature: kinesin family member 2C
gggggtaactggggaagtttctgggcccacaagaaaatgtaggtagtcttagggttaggtctcagctgtcaggaacttgcccctgcccataagatcctaaagggcccccatttgactctcaccagacagttagaacttgtttcctcctccgtgtcagccatcaagaggtgcttggggggctgtgcccagcaggacctcactgcccagcagatcagcaggggagccaagtggcctagatctgctgtggagtacccgactgtttgcctgcctgtctgccctcctcttcacctcattctcatcactgacgtctaccattggcttggaaatcagaaacccatatccatctagatgattgattttgatgatgtggctgcaataaacccagaactcttacagcttcttcccttacatccgaaggacaatctgcccttgcaggaaaatgtaacaatccagaaacaaaaacggagatccgtcaactccaaaattcctgctccaaaagaaagtcttcgaagccgctccactcgcatgtccactgtctcagagcttcgcatcacggctcaggagaatgacatggaggtggagctgcctgcagctgcaaactcccgcaagcagttttcagttcctcctgcccccactaggccttcctgccctgcagtggctgaaataccattgaggatggtcagcgaggagatggaagagcaagtccattccatccgtggcagctcttctgcaaaccctgtgaactcagttcggaggaaatcatgtcttgtgaaggaagtggaaaaaatgaagaacaagcgagaagagaagaaggcccagaactctgaaatgagaatgaagagagctcaggagtatgacagtagttttccaaactgggaatttgcccgaatgattaaagaatttcgggctactttggaatgtcatccacttactatgactgatcctatcgaagagcacagaatatgtgtctgtgttaggaaacgcccactgaataagcaagaattggccaagaaagaaattgatgtgatttccattcctagcaagtgtctcctcttggtacatgaacccaagttgaaagtggacttaacaaagtatctggagaaccaagcattctgctttgactttgcatttgatgaaacagcttcgaatgaagttgtctacaggttcacagcaaggccactggtacagacaatctttgaaggtggaaaagcaacttgttttgcatatggccagacaggaagtggcaagacacatactatgggcggagacctctctgggaaagcccagaatgcatccaaagggatctatgccatggcctcccgggacgtcttcctcctgaagaatcaaccctgctaccggaagttgggcctggaagtctatgtgacattcttcgagatctacaatgggaagctgtttgacctgctcaacaagaaggccaagctgcgcgtgctggaggacggcaagcaacaggtgcaagtggtggggctgcaggagcatctggttaactctgctgatgatgtcatcaagatgctcgacatgggcagcgcctgcagaacctctgggcagacatttgccaactccaattcctcccgctcccacgcgtgcttccaaattattcttcgagctaaagggagaatgcatggcaagttctctttggtagatctggcagggaatgagcgaggcgcagacacttccagtgctgaccggcagacccgcatggagggcgcagaaatcaacaagagtctcttagccctgaaggagtgcatcagggccctgggacagaacaaggctcacaccccgttccgtgagagcaagctgacacaggtgctgagggactccttcattggggagaactctaggacttgcatgattgccacgatctcaccaggcataagctcctgtgaatatactttaaacaccctgagatatgcagacagggtcaaggagctgagcccccacagtgggcccagtggagagcagttgattcaaatggaaacagaagagatggaagcctgctctaacggggcgctgattccaggcaatttatccaaggaagaggaggaactgtcttcccagatgtccagctttaacgaagccatgactcagatcagggagctggaggagaaggctatggaagagctcaaggagatcatacagcaaggaccagactggcttgagctctctgagatgaccgagcagccagactatgacctggagacctttgtgaacaaagcggaatctgctctggcccagcaagccaagcatttctcagccctgcgagatgtcatcaaggccttacgcctggccatgcagctggaagagcaggctagcagacaaataagcagcaagaaacggccccagtgacgactgcaaataaaaatctgtttggttccaaaaaaaa

SEQ ID NO: 242 - DNA, 4148 bp, Homo sapiens
  misc_feature: zinc finger protein 36, C3H type-like 1
  misc_feature (133)..(133): n is a, c, g, or t
  misc_feature (462)..(462): n is a, c, g, or t
  misc_feature (497)..(497): n is a, c, g, or t
  misc_feature (559)..(559): n is a, c, g, or t
  misc_feature (617)..(617): n is a, c, g, or t
  misc_feature (621)..(621): n is a, c, g, or t
  misc_feature (629)..(629): n is a, c, g, or t
  misc_feature (652)..(652): n is a, c, g, or t
  misc_feature (688)..(688): n is a, c, g, or t
  misc_feature (735)..(735): n is a, c, g, or t
  misc_feature (1032)..(1032): n is a, c, g, or t
  misc_feature (1059)..(1059): n is a, c, g, or t
  misc_feature (1077)..(1077): n is a, c, g, or t
  misc_feature (1101)..(1101): n is a, c, g, or t
  misc_feature (2259)..(2259): n is a, c, g, or t
  misc_feature (2542)..(2542): n is a, c, g, or t
  misc_feature (2548)..(2548): n is a, c, g, or t
  misc_feature (2551)..(2551): n is a, c, g, or t
  misc_feature (2867)..(2867): n is a, c, g, or t
  misc_feature (2996)..(2996): n is a, c, g, or t
  misc_feature (3555)..(3556): n is a, c, g, or t
  misc_feature (3826)..(3826): n is a, c, g, or t
  misc_feature (3842)..(3847): n is a, c, g, or t
  misc_feature (3849)..(3849): n is a, c, g, or t
gtccctgacctgcacccttttccaaatcttggggtccaatttgggcaggtgcacagggtcctattggaacaagaacctgcccattggtggctctgcccccatccccgccacccacaatccgctattgactagnaggtgggtaggggggttggtgctttccttttcctttccatctgcagctttgcgttaaagattaaacactggagctcttatccaagcttgctcttgcagccaaaagactaattgcaaaggcatcttctcagtgaagggggcggggtgggctagggctgagtggaaatggtgagagagattattgtagaaaatatctcttccgggaacttagggcaaagagttttattttcaggaatcacatccctgtctcccccaacctcagaccaggcccccaatctcctccccacaagaaaaagcaaaggcagtctgaaaacctgttgccaaaggaanggaacacttctgaaggaggaagttgagagtcttangccaggtcttgaaggagggggtatcaattaagcagagactgattggaaggggacctaacgtngcctatgatagactcctttctgaggtttacctgtttttgtcgcgggcggtggcggggncggngtgcggtnatctagagaggtctgggttgtgngagatattttgagttgaagaatctatttgactagtnaaaaagttgaactttaaagtggtagctttggggacagaggacatggnggttgcattgcaggagtcagcatggagcagggtgcttgtcacacagtttggatcttgtggtttcttacgcatggggccaaaataaacccaggtgaatggcctatgggagggagagagggaagggagcttgctagagccgaggtagagatgagttctttgagaaagagcgggcgtttgtgattgtgtagggggctgcccatagtggacatcctggtggatgtcctctgtccttaccatccttctcttctctctccagggtaacaagatgctcaactatagtgctcccagtgcaggggnttgcctgctggacagaaaggcagtggncacccctgctggtggggncttccctcggaggcactcagtcancctgcccagctccaagttccaccagaaccagctcctcagcagcctcaagggtgagccagcccccgctctgagctcgcgagacagccgcttccgagaccgctccttctcggaagggggcgagcggctgctgcccacccagaagcagcccgggggcggccaggtcaactccagccgctacaagacggagctgtgccgcccctttgaggaaaacggtgcctgtaagtacggggacaagtgccagttcgcacacggcatccacgagctccgcagcctgacccgccaccccaagtacaagacggagctgtgccgcaccttccacaccatcggcttttgcccctacgggccccgctgccacttcatccacaacgctgaagagcgccgtgccctggccggggcccgggacctctccgctgaccgtccccgcctccagcatagctttagctttgctgggtttcccagtgccgctgccaccgccgctgccaccgggctgctggacagccccacgtccatcaccccaccccctattctgagcgccgatgacctcctgggctcacctaccctgcccgatggcaccaataacccttttgccttctccagccaggagctggcaagcctctttgcccctagcatggggctgcccgggggtggctccccgaccaccttcctcttccggcccatgtccgagtcccctcacatgtttgactctccccccagccctcaggattctctctcggaccaggagggctacctgagcagctccagcagcagccacagtggctcagactccccgaccttggacaactcaagacgcctgcccatcttcagcagactttccatctcagatgactaagccagggtagggagggacctcctgcctactccagcccctaccctgcacccacatcccataccctcttctccctacccatcccattccccacaggccctacattaacaaggttaagctcaacccctttcccccagcacctcagaatgtgccctccctctccccctcataaccccacctaacataaggacaagtcaatttgtcagtagcttcttctggcttgaaaccccctccctggattttatagcccacttaccatgcataacagacaagtcccatattttgtcagtagatgcctttttttttccggncttaagccttaagtgccaaatcacaagagaaaaagcagtaacagtttacagaagcaacttagtgccttgtaatctaactttgtcactgtgactacattacctcttcagcgccagagggcacccgtgggcctcccggagcctctgcccatggcggggtggagacccggaaccagcagccccctccactggcgacacaactgcaccttccctcatttcagtctcccgcacacttattcctcctcccctcttcccggtggcacctctccacctgtacccgcccccngccccnccnaccccggccccttggaagagttgttgccagaccagggttttgggggaaacctgtcttgacattcaaaacctttttcttcccgatctgaacccctgttgactaatcttgcctgggtttgtgtaggtctgcaggaaggaaggctgaaaaagcggacgaagattttgacttaagtgggactttgtgatttaattttttcttttttttaagtggggaggaaggggaagctagatggactaggagagacttgattttggtgctaaagttccccagttcatatgtgacatctttttaaaaaaaataacaacaaaaaaaaaantgagagaaaagctaaaaaaaaaaaagtaaggggtgagcagttaatggtattcattccacatacaatatctgtgtaaaacgatttcctgtagaagtagctttaatggtttttgctctagaataccgtagntctatccttagagcactcacgccatgctttcttccctgggttttaaacttcatataactttcagaaattggagagcaaaaattttgcttgtcactgcacatcaatataaaaaagcttatttaacttatcaaaacgtatttattgccaaactatgcttttttttgttaattttgttcatatttatcgggatgacaaatccatagaatatattcttttatgttaaattatgatcttcatattaatcttaaaattttgtgacgtgtctttttcctttttttccacagttttaatatattattcttcaacgacattttttgtaactttacacttttttggttattttattttaaaaaaatgaaaaattaatttaaaaaaatgcaaaaaactgttggattatttattttagaaattcccccctttgtgttggactgcaaattgagtttctttctctttaggcctttcacaactaggactgagaatgtatgtaaaagttctgtgacagtacagaaggaaaacaactttttatgtatagcttctaaaaggggaaaaaaaaaaaaanngagaaaccctttgacttccacgtgcccatctcaagacattccactcacagatttgaggttctggattccaggtctggagttttccaatgttaatgtaaacagaactggcacacacacattaagatgaatgtaattattattcctcttgctggtcactaccgtcgctttctatttctctttctttgtgtgaatttatttaaaagaaaaaaaaactttttgtaacgactatttgcagtttaaaaatcaataaaccccgttttttcaagaaanaaaaaaaaaaaaaaannnnnnanttggttttggtttgactttgccagtaaggttctccccttgtataccttgcaagtcctggggagggggaggcggagagagagggctgtggctgtgggtggcggcatctctcatccctataagctaagcctatagctcccttccttgatgctggcagtttgctgcacttagaggggacggggtggaggttttctgcaaaggagcctgtacttcctgctgtattacttctgaaaagactgtgcagtgtgttagttgttggctgaatagcagcgggcccagccttgccgacacttgtgtggcc

SEQ ID NO: 243 - DNA, 5664 bp, Homo sapiens
  misc_feature: neuropilin 1
  misc_feature (1046)..(1046): n is a, c, g, or t
  misc_feature (1645)..(1645): n is a, c, g, or t
  misc_feature (3164)..(3164): n is a, c, g, or t
  misc_feature (3507)..(3507): n is a, c, g, or t
  misc_feature (3509)..(3510): n is a, c, g, or t
  misc_feature (3975)..(3976): n is a, c, g, or t
  misc_feature (3978)..(3978): n is a, c, g, or t
  misc_feature (4038)..(4039): n is a, c, g, or t
  misc_feature (4050)..(4050): n is a, c, g, or t
  misc_feature (4153)..(4153): n is a, c, g, or t
  misc_feature (4162)..(4162): n is a, c, g, or t
  misc_feature (4414)..(4414): n is a, c, g, or t
  misc_feature (4530)..(4530): n is a, c, g, or t
  misc_feature (4653)..(4653): n is a, c, g, or t
  misc_feature (4957)..(4957): n is a, c, g, or t
  misc_feature (5640)..(5643): n is a, c, g, or t
  misc_feature (5653)..(5653): n is a, c, g, or t
  misc_feature (5655)..(5657): n is a, c, g, or t
  misc_feature (5659)..(5659): n is a, c, g, or t
gagacatggcccgggcagtggctcctggaagaggaacaagtgtgggaaaagggagaggaagccggagctaaatgacaggatgcaggcgacttgagacacaaaaagagaagcgttcctctcggatccaggcattgcctcgctgctttcttttctccaagacgggctgaggattgtacagctctaggcggagttggggctcttcggatcgcttagattctcctctttgctgcatttccccccacgtcctcgttctcccgcgtctgcctgcggacccggagaagggagaatggagagggggctgccgctcctctgcgccgtgctcgccctcgtcctcgccccggccggcgcttttcgcaacgataaatgtggcgatactataaaaattgaaagccccgggtaccttacatctcctggttatcctcattcttatcacccaagtgaaaaatgcgaatggctgattcaggctccggacccataccagagaattatgatcaacttcaaccctcacttcgatttggaggacagagactgcaagtatgactacgtggaagtcttcgatggagaaaatgaaaatggacattttaggggaaagttctgtggaaagatagcccctcctcctgttgtgtcttcagggccatttctttttatcaaatttgtctctgactacgaaacacatggtgcaggattttccatacgttatgaaattttcaagagaggtcctgaatgttcccagaactacacaacacctagtggagtgataaagtcccccggattccctgaaaaatatcccaacagccttgaatgcacttatattgtctttgcgccaaagatgtcagagattatcctggaatttgaaagctttgacctggagcctgactcaaatcctccaggggggatgttctgtcgctacgaccggctagaaatctgggatggattccctgatgttggccctcacattgggcgttactgtggacagaaaacaccaggtcgaatccgatcctcatcgggcattctctccatggttttttacaccgacagcgcgatancaaaagaaggtttctcagcaaactacagtgtcttgcagagcagtgtctcagaagatttcaaatgtatggaagctctgggcatggaatcaggagaaattcattctgaccagatcacagcttcttcccagtatagcaccaactggtctgcagagcgctcccgcctgaactaccctgagaatgggtggactcccggagaggattcctaccgagagtggatacaggtagacttgggccttctgcgctttgtcacggctgtcgggacacagggcgccatttcaaaagaaaccaagaagaaatattatgtcaagacttacaagatcgacgttagctccaacggggaagactggatcaccataaaagaaggaaacaaacctgttctctttcagggaaacaccaaccccacagatgttgtggttgcagtattccccaaaccactgataactcgatttgtccgaatcaagcctgcaacttgggaaactggcatatctatgagatttgaagtatacggttgcaagataacagattatccttgctctggaatgttgggtatggtgtctggacttatttctgactcccagatcacatcatccaaccaaggngacagaaactggatgcctgaaaacatccgcctggtaaccagtcgctctggctgggcacttccacccgcacctcattcctacatcaatgagtggctccaaatagacctgggggaggagaagatcgtgaggggcatcatcattcagggtgggaagcaccgagagaacaaggtgttcatgaggaagttcaagatcgggtacagcaacaacggctcggactggaagatgatcatggatgacagcaaacgcaaggcgaagtcttttgagggcaacaacaactatgatacacctgagctgcggacttttccagctctctccacgcgattcatcaggatctaccccgagagagccactcatggcggactggggctcagaatggagctgctgggctgtgaagtggaagcccctacagctggaccgaccactcccaacgggaacttggtggatgaatgtgatgacgaccaggccaactgccacagtggaacaggtgatgacttccagctcacaggtggcaccactgtgctggccacagaaaagcccacggtcatagacagcaccatacaatcagagtttccaacatatggttttaactgtgaatttggctggggctctcacaagaccttctgccactgggaacatgacaatcacgtgcagctcaagtggagtgtgttgaccagcaagacgggacccattcaggatcacacaggagatggcaacttcatctattcccaagctgacgaaaatcagaagggcaaagtggctcgcctggtgagccctgtggtttattcccagaactctgcccactgcatgaccttctggtatcacatgtctgggtcccacgtcggcacactcagggtcaaactgcgctaccagaagccagaggagtacgatcagctggtctggatggccattggacaccaaggtgaccactggaaggaagggcgtgtcttgctccacaagtctctgaaactttatcaggtgattttcgagggcgaaatcggaaaaggaaaccttggtgggattgctgtggatgacattagtattaataaccacatttcacaagaagattgtgcaaaaccagcagacctggataaaaagaacccagaaattaaaattgatgaaacagggagcacgccaggatacgaaggtgaaggagaaggtgacaagaacatctccaggaagccaggcaatgtgttgaagaccttagaccccatcctcatcaccatcatagccatgagtgccctgggggtcctcctgggggctgtctgtggggtcgtgctgtactgtgcctgttggcataatgggatgtcagaaagaaacttgtctgccctggagaactataactttgaacttgtggatggtgtgaagttgaaaaaagacaaactgaatacacagagtacttattcggaggcatgaaggcagacagagatgaaaagacagtcaaaggacggaagtggaaggacgggagtgagctggggagctgttgatctttcactatacaggctgggaagtgtgttgatgnccactgagccaggcttttctcaggagcttcaatgagtatggccgacagacatggacaaggagctgtgttcaccatcggactcatgtgcagtcagcttttttcctgttggtttcatttgaataatcagatgctggtgttgagaccaagtatgattgacataatcattcatttcgacccctcctgcccctctctctctctctcctctcccctttgtggattctttttggaaactgagcgaaatccaagatgctggcaccaagcgtattccgtgtggccctttggatggacatgctacctgaaacccagtgcccagaatatactagaatcaccgcatttcagtggncnnctgaagttgtacttgtgtataattgcccgcgtcgtgcataggcaaagaaggattaggctgttttctttttaaagtactgtagcctcagtactggtgtagtgtgtcagctctgtttacgaagcaatactgtccagttttcttgctgtttttccggtgttgtactaaacctcgtgcttgtgaactccatacagaaaacggtgccatccctgaacacggctggccactgggtatactgctgacaaccgcaacaacaaaaacacaaatccttggcactggctagtctatgtcctctcaagtgcctttttgtttgtactggttcattgtgttacattaacgacccactctgcttcttgctggtgaaagccctgctctttaatcaaactctggtggcccactgactaagaagaaagtttattttcgtgtgagatgccagcccctccgggcaggcaagggctctgaagattnngncaacgtggcttaattgttctgctttttctgtagttcaatttcatgtttcttgaccctttnngtataaagctncaatattctctcttattgttctttcatatggaatgtattttcaaatgtaaactctcttctctttctctctcctatctctctgtcttttttctctcttagaatnggaggattngccattgtccaggaaagaaacttgcagctttaacctgctgggaatggcaaacgattttactagactttatgtttaaaaataaataaataagggaaattcctaactttgccctccaaagtctaactttggttttcttgttaactggttaaagtgacagtatcttttttccttatctattctattcaaaatgacctttgatagaaatgttggcatttagtagaaatagtgataagttgaggaaagaaataatanaaattggctttcaagtgagacccaaaggaagaactggataaaatcttccaaatccaaaagcatgagatttttctatccaaatatgcaaaaatgacccaagagaactttcttatttngctactgagtcacacaagggaagtggaaggaagaacagttaatttaagaatgaaactataaatcctgatgcctgggggtcaagtattttaagataagagggggaaaaacacataaagtcaaancaaatgttttaaaaattcataacagcaaccttgaaaaaatagacttaaatgaatgcttctagaaacttccagcggctcacaaagaataagcctgccttagggctggcaacatctaagcctctaacagcacagggaagcaaatatcttaccaggcagcctatgaattaacccaaagaagctttggttggttttggtggatttttatcatgccatgttggacatgagattttttagatcttccttcccacattgctagacgtctcactcaaagacatttgttgggagtcacatttgcatcatagangagacagtccattcatcttagttaaattggattgagaatgccttttgtttccaggaaaatattgatcaccatgaaagaagaatagttttttgtccccagagacattcatttagttgatataatcctaccagaaggaaagcactaagaaacactcgtttgttgtttttaaaggcaacagacttaaagttgtcctcagccaaggaaaaatgatactgcaactttaaaatttaaagtatcttgcactgataaatatatttaaaaattatatgtttataaagttattaatttgtaaaggcagtgttacaaaatgttcagtttatattgttttagattgttttgtaatttttaaaggtgtaaaataacatattttttctttatggaaatctataaaactttctgtagtaaaatgttttcattttactggtatattattgcttcatgttttgtaccatcataagattttgtgcagattttttttacagaaattattattttctatgacaatatgacacttgtaaattgttgtttcaaaatgaacagcgaagccttaactttaaatgacatttgtattctcagacactgagtagcataaaaaccacatagaactgaactgtaacttaaattccaaactatgactactacattccaaagaaacagttgaattaaacattttcataaaatannnnaaaaaaaaanannngnccgct

SEQ ID NO: 244 - DNA, 13235 bp, Homo sapiens
  misc_feature: Ataxia telangiectasia mutated (includes complementation groups A, C and D)
  misc_feature (696)..(696): n is a, c, g, or t
  misc_feature (4487)..(4488): n is a, c, g, or t
  misc_feature (5670)..(5670): n is a, c, g, or t
  misc_feature (5688)..(5688): n is a, c, g, or t
  misc_feature (5967)..(5967): n is a, c, g, or t
  misc_feature (5971)..(5971): n is a, c, g, or t
  misc_feature (6369)..(6369): n is a, c, g, or t
  misc_feature (6458)..(6458): n is a, c, g, or t
  misc_feature (6788)..(6789): n is a, c, g, or t
  misc_feature (6792)..(6793): n is a, c, g, or t
  misc_feature (6796)..(6798): n is a, c, g, or t
  misc_feature (6801)..(6801): n is a, c, g, or t
  misc_feature (6852)..(6852): n is a, c, g, or t
  misc_feature (6859)..(6860): n is a, c, g, or t
  misc_feature (8513)..(8513): n is a, c, g, or t
  misc_feature (8515)..(8524): n is a, c, g, or t
  misc_feature (8627)..(8627): n is a, c, g, or t
  misc_feature (8636)..(8636): n is a, c, g, or t
  misc_feature (8679)..(8679): n is a, c, g, or t
  misc_feature (9037)..(9037): n is a, c, g, or t
  misc_feature (9158)..(9158): n is a, c, g, or t
  misc_feature (9473)..(9474): n is a, c, g, or t
  misc_feature (9741)..(9741): n is a, c, g, or t
  misc_feature (9749)..(9749): n is a, c, g, or t
  misc_feature (9757)..(9757): n is a, c, g, or t
  misc_feature (9880)..(9880): n is a, c, g, or t
  misc_feature (9907)..(9908): n is a, c, g, or t
  misc_feature (9913)..(9913): n is a, c, g, or t
  misc_feature (9917)..(9917): n is a, c, g, or t
  misc_feature (9977)..(9979): n is a, c, g, or t
  misc_feature (11110)..(11110): n is a, c, g, or t
  misc_feature (11224)..(11224): n is a, c, g, or t
  misc_feature (11284)..(11284): n is a, c, g, or t
  misc_feature (11779)..(11779): n is a, c, g, or t
  misc_feature (12266)..(12266): n is a, c, g, or t
  misc_feature (12900)..(12900): n is a, c, g, or t
  misc_feature (13100)..(13100): n is a, c, g, or t
  misc_feature (13121)..(13121): n is a, c, g, or t
  misc_feature (13123)..(13123): n is a, c, g, or t
agtgggcgctgggcagtcacgcagggtttgaaccggaagcgggagtaggtagctgcgtggctaacggagaaaagaagccgtggccacgggaggaggcgagaggagtcgggatctgcgctgcagccaccgccgcggttgatactactttgaccttccgagtgcagtggcactgtaagcatgtatatgggtccttaaagggactcatagagaggcatacatcacaatttggaattatgcattggtttatcaatttacttgtttattgtcaccctgctgcccagatatgacttcatgaggacagtgatgtgtgttctgaaattgtgaaccatgagtctagtacttaatgatctgcttatctgctgccgtcaactagaacatgatagagctacagaacgaaagaaagaagttgagaaatttaagcgcctgattcgagatcctgaaacaattaaacatctagatcggcattcagattccaaacaaggaaaatatttgaattgggatgctgtttttagatttttacagaaatatattcagaaagaaacagaatgtctgagaatagcaaaaccaaatgtatcagcctcaacacaagcctccaggcagaaaaagatgcaggaaatcagtagtttggtcaaatacttcatcaaatgtgcaaacagaagtaagtgatgttataaattataaataaatggcttaacngataaaatggatacagtgaaagattcatctaatggtgctatttacggagctgattgtagcaacatactactcaaagacattctttctgtgagaaaatactggtgtgaaatatctcagcaacagtggttagaattgttctctgtgtacttcaggctctatctgaaaccttcacaagatgttcatagagttttagtggctagaataattcatgctgttaccaaaggatgctgttctcagactgacggattaaattccaaatttttggactttttttccaaggctattcagtgtgcgagacaagaaaagagctcttcaggtctaaatcatatcttagcagctcttactatcttcctcaagactttggctgtcaactttcgaattcgagtgtgtgaattaggagatgaaattcttcccactttgctttatatttggactcaacataggcttaatgattctttaaaagaagtcattattgaattatttcaactgcaaatttatatccatcatccgaaaggagccaaaacccaagaaaaaggtgcttatgaatcaacaaaatggagaagtattttatacaacttatatgatctgctagtgaatgagataagtcatataggaagtagaggaaagtattcttcaggatttcgtaatattgccgtcaaagaaaatttgattgaattgatggcagatatctgtcaccaggtttttaatgaagataccagatccttggagatttctcaatcttacactactacacaaagagaatctagtgattacagtgtcccttgcaaaaggaagaaaatagaactaggctgggaagtaataaaagatcaccttcagaagtcacagaatgattttgatcttgtgccttggctacagattgcaacccaattaatatcaaagtatcctgcaagtttacctaactgtgagctgtctccattactgatgatactatctcagcttctaccccaacagcgacatggggaacgtacaccatatgtgttacgatgccttacggaagttgcattgtgtcaagacaagaggtcaaacctagaaagctcacaaaagtcagatttattaaaactctggaataaaatttggtgtattacctttcgtggtataagttctgagcaaatacaagctgaaaactttggcttacttggagccataattcagggtagtttagttgaggttgacagagaattctggaagttatttactgggtcagcctgcagaccttcatgtcctgcagtatgctgtttgactttggcactgaccaccagtatagttccaggaacggtaaaaatgggaatagagcaaaatatgtgtgaagtaaatagaagcttttctttaaaggaatcaataatgaaatggctcttattctatcagttagagggtgacttagaaaatagcacagaagtgcctccaattcttcacagtaattttcctcatcttgtactggagaaaattcttgtgagtctcactatgaaaaactgtaaagctgcaatgaattttttccaaagcgtgccagaatgtgaacaccaccaaaaagataaagaagaactttcattctcagaagtagaagaactatttcttcagacaacttttgacaagatggactttttaaccattgtgagagaatgtggtatagaaaagcaccagtccagtattggcttctctgtccaccagaatctcaaggaatcactggatcgctgtcttctgggattatcagaacagcttctgaataattactcatctgagattacaaattcagaaactcttgtccggtgttcacgtcttttggtgggtgtccttggctgctactgttacatgggtgtaatagctgaagaggaagcatataagtcagaattattccagaaagccaagtctctaatgcaatgtgcaggagaaagtatcactctgtttaaaaataagacaaatgaggaattcagaattggttccttgagaaatatgatgcagctatgtacacgttgcttgagcaactgtaccaagaagagtccaaataagattgcatctggctttttcctgcgattgttaacatcaaagctaatgaatgacattgcagatatttgtaaaagtttagcatccttcatcaaaaagccatttgaccgtggagaagtagaatcaatggaagatgatactaatggaaatctaatggaggtggaggatcagtcatccatgaatctatttaacgattaccctgatagtagtgttagtgatgcaaacgaacctggagagagccaaagtaccataggtgccattaatcctttagctgaagaatatctgtcaaagcaagatctacttttcttagacatgctcaagttcttgtgtttgtgtgtaactactgctcagaccaatactgtgtcctttagggcagctgatattcggaggaaattgttaatgttaattgattctagcacgctagaacctaccaaatccctccacctgcatatgtatctaatgcttttaaaggagcttcctggagaagagtaccccttgccaatggaagatgttcttgaacttctgaaaccactatccaatgtgtgttctttgtatcgtcgtgaccaagatgtttgtaaaactattttaaaccatgtccttcatgtagtgaaaaacctaggtcaaagcaatatggactctgagaacacaagggatgctcaaggacagtttcttacagtaattggagcattttggcatctaacaaaggagaggaaatatatattctctgtaagaatggccctagtaaattgccttaaaactttgcttgaggctgatccttattcaaaatgggccattcttaatgtaatgggaaaagactttcctgtaaatgaagtatttacacaatttcttgctgacaatcatcaccaagttcgcatgttggctgcagagtcaatcaatagattgttccaggacacgaagggagattcttccaggttactgaaagcacttcctttgaagcttcagcaaacagcttttgaaaatgcatacttgaaagctcaggaaggaatgagagaaatgtcccatagtgctgagaaccctgaaactttggatgaaatttataatagaaaatctgttttactgacgttgatagctgtggttttatcctgtagccctatctgcgaaaaacaggctttgtttgccctgtgtaaatctgtgaaagagaatggattagaacctcaccttgtgaaaaaggttttagagaaagtttctgaaacttttggatatagacgtttagaagactttatggcatctcatttagattatctggttttggaatggctaaatcttcaagatactgaatacaacttatcttcttttccttttattttattaaactacacaaatattgaggatttctatagatcttgttataaggttttgattccacatctggtgattagaagtcattttgatgaggtgaagtccattgctaatcagattcaagaggactggaaaagtcttctaacagactgctttccaaagattcttgtaaatattcttccttattttgcctatgagggtaccagagacagtgggatggcacagcaaagagagactgctaccaaggtctatgatatgcttaaaagtgaaaacttattgggaaaacagattgatcacttattcattagtaatttaccagagattgtggtggagttattgatgacgttacatgagccagcaaattctagtgccagtcagagcactgacctctgtgacttttcaggggatttggatcctgctcctaatccacctcattttccatcgcatgtgannaaagcaacatttgcctatatcagcaattgtcataaaaccaagttaaaaagcattttagaaattctttccaaaagccctgattcctatcagaaaattcttcttgccatatgtgagcaagcagctgaaacaaataatgtttataagaagcacagaattcttaaaatatatcacctgtttgttagtttattactgaaagatataaaaagtggcttaggaggagcttgggcctttgttcttcgagacgttatttatactttgattcactatatcaaccaaaggccttcttgtatcatggatgtgtcattacgtagcttctccctttgttgtgacttattaagtcaggtttgccagacagccgtgacttactgtaaggatgctctagaaaaccatcttcatgttattgttggtacacttataccccttgtgtatgagcaggtggaggttcagaaacaggtattggacttgttgaaatacttagtgatagataacaaggataatgaaaacctctatatcacgattaagcttttagatccttttcctgaccatgttgtttttaaggatttgcgtattactcagcaaaaaatcaaatacagtagaggacccttttcactcttggaggaaattaaccattttctctcagtaagtgtttatgatgcacttccattgacaagacttgaaggactaaaggatcttcgaagacaactggaactacataaagatcagatggtggacattatgagagcttctcaggataatccgcaagatgggattatggtgaaactagttgtcaatttgttgcagttatccaagatggcaataaaccacactggtgaaaaagaagttctagaggctgttggaagctgcttgggagaagtgggtcctatagatttctctaccatagctatacaacatagtaaagatgcatcttataccaaggcccttaagttatttgaagataaagaacttcagtggaccttcataatgctgacctacctgaataacacactggtagaagattgtgtcaaagttcgatcagcagctgttacctgtttgaaaaacattttagccacaaagactggacatagtttctgggagatttataagatgacaacagatccaatgctggcctatctacagccttttagaacatcaagaaaaaagtttttagaagtacccagattngacaaagaaaaccctttngaaggcctggatgatataaatctgtggattcctctaagtgaaaatcatgacatttggataaagacactgacttgtgcttttttggacagtggaggcacaaaatgtgaaattcttcaattattaaagccaatgtgtgaagtgaaaactgacttttgtcagactgtacttccatacttgattcatgatattttactccaagatacaaatgaatcatggagaaatctgctttctacacatgttcagggatttttcaccagctgtcttcgacacttctcgcanacgngccgatccacaacccctgcaaacttggattcagagtcagagcactttttccgatgctgtttggataaaaaatcacaaagaacaatgcttgctgttgtggactacatgagaagacaaaagagaccttcttcaggaacaatttttaatgatgctttctggctggatttaaattatctagaagttgccaaggtagctcagtcttgtgctgctcactttacagctttactctatgcagaaatctatgcagataagaaaagtatggatgatcaagagaaaagaagtcttgcatttgaagaaggaagccagagtacaactatttctagcttgagtgaaaaaagtaaagaagaaactggaataagtttacaggatcttctcttagaaatctacagaagtataggngagccagatagtttgtatggctgtggtggagggaagatgttacaacccattactagactacgaacatatgaacacgaagcaatgtgggncaaagccctagtaacatatgacctcgaaacagcaatcccctcatcaacacgccaggcaggaatcattcaggccttgcagaatttgggactctgccatattctttccgtctatttaaaaggattggattatgaaaataaagactggtgtcctgaactagaagaacttcattaccaagcagcatggaggaatatgcagtgggaccattgcacttccgtcagcaaagaagtagaaggaaccagttaccatgaatcattgtacaatgctctacaatctctaagagacagagaattctctacattttatgaaagtctcaaatatgccagagtaannaannaannnggnaagagatgtgtaagcgcagccttgagtctgtgtattcgctctatcccacancttagcnngttgcaggccattggagagctggaaagcattggggagcttttctcaagatcagtcacacatagacaactctctgaagtatatattaagtggcagaaacactcccagcttctcaaggacagtgattttagttttcaggagcctatcatggctctacgcacagtcattttggagatcctgatggaaaaggaaatggacaactcacaaagagaatgtattaaggacattctcaccaaacaccttgtagaactctctatactggccagaactttcaagaacactcagctccctgaaagggcaatatttcaaattaaacagtacaattcagttagctgtggagtctctgagtggcagctggaagaagcacaagtattctgggcaaaaaaggagcagagtcttgccctgagtattctcaagcaaatgatcaagaagttggatgccagctgtgcagcgaacaatcccagcctaaaacttacatacacagaatgtctgagggtttgtggcaactggttagcagaaacgtgcttagaaaatcctgcggtcatcatgcagacctatctagaaaaggcagtagaagttgctggaaattatgatggagaaagtagtgatgagctaagaaatggaaaaatgaaggcatttctctcattagcccggttttcagatactcaataccaaagaattgaaaactacatgaaatcatcggaatttgaaaacaagcaagctctcctgaaaagagccaaagaggaagtaggtctccttagggaacataaaattcagacaaacagatacacagtaaaggttcagcgagagctggagttggatgaattagccctgcgtgcactgaaagaggatcgtaaacgcttcttatgtaaagcagttgaaaattatatcaactgcttattaagtggagaagaacatgatatgtgggtattccgactttgttccctctggcttgaaaattctggagtttctgaagtcaatggcatgatgaagagagacggaatgaagattccaacatataaatttttgcctcttatgtaccaattggctgctagaatggggaccaagatgatgggaggcctaggatttcatgaagtcctcaataatctaatctctagaatttcaatggatcacccccatcacactttgtttattatactggccttagcaaatgcaaacagagatgaatttctgactaaaccagaggtagccagaagaagcagaataactaaaaatgtgcctaaacaaagctctcagcttgatgaggatcgaacagaggctgcaaatagaataatatgtactatcagaagtaggagacctcagatggtcagaagtgttgaggcactttgtgatgcttatattatattagcaaacttagatgccactcagtggaagactcagagaaaaggcataaatattccagcagaccagccaattactaaacttaagaatttagaagatgttgttgtccctactatggaaattaaggtggaccacacaggagaatatggaaatctggtgactatacagtcatttaaagcagaatttcgcttagcaggaggtgtaaatttaccaaaaataatagattgtgtaggttccgatggcaaggagaggagacagcttgttaagggccgtgatgacctgagacaagatgntnnnnnnnnnnaggtcttccagatgtgtaatacattactgcagagaaacacggaaactaggaagaggaaattaactatctgtacttataaggtggttcccctctctcagcgaantggtgttcntgaatggtgcacaggaactgtccccattggtgaatttcttgtnaacaatgaagatggtgctcataaaagatacaggccaaatgatttcagtgcctttcagtgccaaaagaaaatgatggaggtgcaaaaaaagtcttttgaagagaaatatgaagtcttcatggatgtttgccaaaattttcaaccagttttccgttacttctgcatggaaaaattcttggatccagctatttggtttgagaagcgattggcttatacgcgcagtgtagctacttcttctattgttggttacatacttggacttggtgatagacatgtacagaatatcttgataaatgagcagtcagcagaacttgtacatatagatctaggtgttgcttttgaacagggcaaaatccttnctactcctgagacagttccttttagactcaccagagatattgtggatggcatgggcattacgggtgttgaaggtgtcttcagaagatgctgtgagaaaaccatggaagtgatgagaaactntcaggaaactctgttaaccattgtagaggtccttctatatgatccactctttgactggaccatgaatcctttgaaagctttgtatttacagcagaggccggaagatgaaactgagcttcaccctactctgaatgcagatgaccaagaatgcaaacgaaatctcagtgatattgaccagagtttcaacaaagtagctgaacgtgtcttaatgagactacaagagaaactgaaaggagtggaagaaggcactgtgctcagtgttggtggacaagtgaatttgctcatacagcaggccatagaccccaaaaatctcanncgacttttcccaggatggaaagcttgggtgtgatcttcagtatatgaattaccctttcattcagcctttagaaattatattttagcctttatttttaacctgccaacatactttaagtagggattaatatttaagtgaactattgtgggtttttttgaatgttggttttaatacttgatttaatcaccactcaaaaatgttttgatggtcttaaggaacatctctgctttcactctttagaaataatggtcattcgggctgggcgcngcggctcncgcctgtnatcccagcactttgggaggccgaggtgagcggatcacaaggtcaggagttcgagaccagcctggccaagagaccagcctggccagtatggtgaaaccctgtctctactaaaaatacaaaaatnagccgagcatggtggcgggcacctgtnntcccngctnctcgagaggctgaggcaggagaatctcttgaacctgggaggtgaaggttgctgtgggccnnnatcatgccattgcactccagcctgggtgacaagagcgaaactccatctcaaaaaaaaaaaaaaaaaacagaaacttatttggatttttcctagtaagatcactcagtgttactaaataatgaagttgttatggagaacaaatttcaaagacacagttagtgtagttactatttttttaagtgtgtattaaaacttctcattctattctctttatcttttaagcccttctgtactgtccatgtatgttatctttctgtgataacttcatagattgccttctagttcatgaattctcttgtcagatgtatataatctcttttaccctatccattgggcttcttctttcagaaattgtttttcatttctaattatgcatcatttttcagatctctgtttcttgatgtcatttttaatgtttttttaatgttttttatgtcactaattattttaaatgtctgtacttgatagacactgtaatagttctattaaatttagttcctgctgtttatatctgttgatttttgtatttgataggctgttcatccagttttgtctttttgaaaagtgagtttattttcagcaaggctttatctatgggaatcttgagtgtctgtttatgtcatattcccagggctgttgctgcacacaagcccattcttattttaatttcttggctttagggtttccatacctgaagtgtagcataaatactgataggagatttcccaggccaaggcaaacacacttcctcctcatctccttgtgctagtgggcagaatatttgattgatgcctttttcactgagagtataagcttccatgtgtcccacctttatggcaggggtggaaggaggtacatttaattcccactgcctgcctttggcaagccctgggttctttgctccccatatagatgtctaagctaaaagccgtgggttaatgagactggcaaattgttccaggacagctacagcatcagctcacatattcacctctctggtttttcattcccctcatttttttctgagacagagtcttgctctgtcacccaggctggagtgcagtggcatgatctcagctcactgaaacctctgcctcctgggttcaagcaattctcctgcctcagcctccngagtagctgggactacaggcgtgtgccaacacgcccggctaattttttgtatttttattagagacggagtttcaccgtgttagccaggatggtctcgatcgcttgacctcgtgntccaccctcctcggcctcccaaagtgctgggattacaggtgtgagccaccgcgcccggcntcattcccctcatttttgaccgtaaggatttcccctttcttgtaagttctgctatgtatttaaaagaatgttttctacattttatccagcatttctctgtgttctgttggaagggaagggcttaggtatctagtttgatacataggtagaagtggaacatttctctgtcccccagctgtcatcatataagataaacatcagataaaaagccacctgaaagtaaaactactgactcgtgtattagtgagtataatctcttctccatccttaggaaaatgttcatcccagctgcggagattaacaaatgggtgattgagctttctcctcgtatttggaccttgaaggttatataaatttttttcttatgaagagttggcatttctttttattgccaatggcaggcactcattcatatttgatctcctcaccttcccctcccctaaaaccaatctccagaactttttggactataaatttcttggtttgacttctggnagaactgttcagaatattactttgcatttcaaattacaaacttaccttggtgtatctttttcttacaagctgcctaaatgaatatttggtatatattggtagttttattactatagtaaatcaaggaaatgcagtaaacttaaaatgtctttaagaaagccctgaaatcttcatgggtgaaattagaaattatcaactagataatagtatagataaatgaatttgtagctaattcttgctagttgttgcatccagagagctttgaataacatcattaatctactctttagccttgcatggtatgctatgaggctcctgttctgttcaagtattctaatcaatggctttgaaaagtttatcaaatttacatacagatcacaagcctaggagaaataactaattcacagatgacagaattaagattataaaagattttttttttgtaattttagtagagacagggttgccattgtattccagccttggngacagagcaagactctgcctcaaaaaaaaaaaaaaaaaggttttggcaagctggaactctttctgcaaatgactaagatagaaaactgccaaggacaaatgaggagtagttagattttgaaaatattaatcatagaatagttgttgtatgctaagtcactgacccatattatgtacagcatttctgatctttactttgcaagattagtgatactatcccaatacactgctggagaaatcagaatttggagaaataagttgtccaaggcaagaagatagtaaattataagtacaagtgtaatatggacagtatctaacttgaaaagatttcaggcgaaaagaatctggggtttgccagtcagttgctcaaaaggtcaatgaaaaccaaatagtgaagctatcagagaagctaataaattatagactgcttgaacagttgtgtccagattaagggagataatagctttcccaccctactttgtgcaggtcatacctccccaaagtgtttacctaatcagtaggttcacaaactcttggtcattatagtatatgcctaaaatgtatgcacttaggaatgctaaaaatttaaatatggtctaaagcaaataaaagcaaagaggaaaaactttggacancgtaaagactagaatagtcttttaaaaagaaagccagtatattggtttgaaatatagagatgtgtcccaatttcaagtattttaattgcaccttaatgaaattatctattttctatagattttagtactattgaatgtattactttactgttacctgaatttattataaagtgtttttgaataaataattctaaaagcanaaaaaaaaaaaaaaaaaaaanantcaaatatttgtgtgttctgtgtgccaggcatgggactcgttctaaggagaaagcagtgagcaaggcaggcatagtctgcctatataaagctcccaatctgaggaggatagg

SEQ ID NO: 245 - DNA, 4477 bp, Homo sapiens
  misc_feature: erythrocyte membrane protein band 4.1-like 3
  misc_feature (436)..(436): n is a, c, g, or t
  misc_feature (1309)..(1311): n is a, c, g, or t
  misc_feature (1313)..(1314): n is a, c, g, or t
  misc_feature (1783)..(1784): n is a, c, g, or t
  misc_feature (1797)..(1798): n is a, c, g, or t
  misc_feature (1965)..(1965): n is a, c, g, or t
  misc_feature (2005)..(2005): n is a, c, g, or t
  misc_feature (3355)..(3356): n is a, c, g, or t
  misc_feature (3389)..(3389): n is a, c, g, or t
  misc_feature (3397)..(3397): n is a, c, g, or t
  misc_feature (3409)..(3409): n is a, c, g, or t
  misc_feature (3534)..(3534): n is a, c, g, or t
  misc_feature (3658)..(3658): n is a, c, g, or t
tttttttttttttttttttttttttttcagtgcatttgccatttttatttcgctatgcagaaacatacattcaccatgggctgtgatgcaggtgatcgtgtaatggagaatctctctttttgaaggctatttataactaacactaaatagttttaattacagtggaaattctgtacagtttaaggcttggctctgaactagaatgtaaatatggaccagatttgaaaataaaacactttcttttcaagtaaaagaagaaaaatcaattaaaaaatacacggcacggaaaaagtaactaagaaaacaaagccacaggaagcccagcagtttctcctgaagtgaaatttcataatattgtaaactaacaaaaatacaggttttcttcccaaaataatgacaatttaagctctctggattgaacacagaccaaagcaancaacaaggaagaaatcgcattaatatgctaaaatcagtactaccttataacaaattaaatgagatacacaaagcaagattggaagcattacatatttccagagggtcagagagtcattactgtttatgggtgagagtaataaaaccagatgaaacaagtacaagttgtttactgaataaacttggttattggcacatctaatctgaggaaaatctgacacaccggacggacctagacagcttctagcatttgagggtaatcttcatttattgtaaatataaggttacctaagaaattgcaattttgtttagactttaataataataaactatgaaaggcatgaattgtttatgtgttacatgagaccacggtttatattgttggttatgaacgtgcaggtatagctgaaaactgagacattttgtgaaaattaaaaatgctgctcttttgtaattttatcgttgcttcatgcattatcggtttagtgatgctgaatcagattgctttattatgggaagatctctctgccagtgtctttattaatggtcaaggtcaattcttctggactgaaattttccacggacagatacaagtcagttgggttagaagagggaactccatataggctctggttttcctaacggtttgcatgactgcattcatgtgcaagctaagttattcctctggtcaatcctctccatcttctggtgtgatctctgtctctttatggaccactactttggtcactgacatgtcagggtgctgctctttggcctctttaattgcctgagccagcgcctggtcatggtcaatgtctgcatcccccgtgatgactattcgcttctcaattcttgtctctgaaatgcccccttnnncnnttttggtgatgtgcgtagtggtggtggtactggtggtttcagatgtgatcgtctgtgcactcatcagcacgcctggctccagatctgtgcctggatcgacctgtgatgattcatatgtgatggttttggtttcggtgtgaactactggcacttccttcgtggaaatttctagctttactcctcccggtgaaacactgccaaaactgatggtttccgtcttcaccgttgaggactcaaaatgaggtttttgttccaaagtttctgaaatgtggatggctgcactctgctcctcttgtcgctcacgggaagcagcggctgtctcttcctgttccaggacagctttagcgacctcctcccctccttcctctttagccccctccgtcaaggcagagccctctttccctttaatgcctgtgaatgcgggctgtgctgcagcatccccgctgtctcccgccgagtaagaagcatnncccactcgcgtgnnccacacgccgctcctccaccaacacggtctcctgcaccaccttctcagtgctaagcggcaggtggtgcacggtgggttccgtctctattccactggactccgtcttggtttccattttctgaacccagctttgagaagtagaagtaacccctcctatgaattctgtnggttttcgcgcagactctaataaactgaagatttcagagncatccatgagcttttccccagaagactgcttagtctcttcagggacaagtggttcgatcatgggggcatcctcctgcctggcggccagtcgcacgggggaggtggaaagcctcttctcccattcattcgttacggcagtgtctgttgaggtttctaagaaggttcttttcagctcgctaatgttggtttgatgtttcatcaggtcatcttgagttttttctagctcctgtgccttgagctctgcatcttcctcctggtccgactcagtggcggtggtctccccgtcggctgcggtgtccgtgcgctcactgtcagtctcttcctctgaactgtcactcgggtcattgtctagggaggcgctcaaggaggccgccttgggctccaggtagcagaggcacagagccagagggaaggagagagtgagagcgtatggcactgagaaggaggcagacagcagaaagaaaaagatgaagaggaaacagggcacaagggacggtgagcggatcgggaggtaatgctgcaagctctggggcaggaggttggtttcagaaaggttggggaaagagaggtatccatcatcatctaggagggaggggaatgactcagggagctgcaaggagaaggagaacagggtggtccccttgccagtttgctgtctgtagctaaaagccacatcttgatcccctaggtaaggcctccctgggccatcagagtccaaggcgggctctccaggcaggtgctcagctctggacggctcataacctggcagtttgcagtcattctccttacacctcctacggagctctgtgggagatgtgggggcacaatgggtggatgggggtgacaagggacatgagtcagtgccaagcccaggtgactttccctcgtgccggatggccgagatgggcgtgacttcttcccccttcctccgtttgtcctcttcctcgtcccgctcctcctcagccttcttctccggagtcacagtggtgatcaagttggtctgagagatgccttttgttgtggcgtactggccagtaccaacctctccatccaagctgcgagacatggtataacgtttgctggatgagcgttcaaagtaaggtgctgggcgatctatcaacgcactggctcttctcgtttgcgcttgtgtcctgccactataacgaaacttggaacccaaggttaggaatttcttgggaggtgcttctggtaacagtagtctgaaaaatgtatgatgctcaacacatactttccataaacgcttggcagctcgatggtttggcagcttaaacccaatggtgctttcaaattgttcaaactctcccggccggatcttaatgtaaaagttgnnccgtttgtatgaaatctttagaaccttgggccnaggcaaantctgtttattcngcagccggtcgcgatatatcaacagaccacttgcacaaactcctaacataatttctaccccttctgagtccttagcatgatgtaaatctaccccatacattgataattttttggcattttccaanaaatgcatctctgcttctgctggcgtcattcctctgtggctcttgtgcagctcgatcactttgtcttccagttctttagtgtggtttggtgcaaagcggaactcactaatgtaatcgctcccanattcatctgggtcatagtctccgagctctgactggacagtgtaggagcccagcaaggccagggtaacaaaggagcagggcagccttccggacacgatgtcatctcgcaactgcaagcagaggtagtacctggtgatatcttcagatagttgggcagggtctggtggataaaatttcacattaaatgaaaagtgccaagcaccacttcgaacctgtttttttatttccttagcagggtccaaccaattcttctggttttcagcatctcgatacgtaagcccaaagtagtctttctctagcaagttcaagtgttcacacactttatcaaacagcacttgtcctctggagcgtttctctacatcacaggtatattctgatccatcgagaagtatcactttgcactgcatgcttttaggctttttgacaatctttaatggagaccgagagagtttactgctagatgatttctgagaaagtttatcgtcttctaattgctgatattcgagctgttttgcagccctggcagcaaactcctgttccttgtcagtgacctccctccgcaccggggtgctgtgcgctgcagcggcggcgaactgctccagggcctgctgctgctcctccttgggcggctccggcacgggcgcccccgcgcgcccctgcgcccccgccgcctcctggggctcggcctcctggtccggcttggattccgagtctgatccagattcggtcgtcatggttgattgttctgggatcagcagggagcccgggcgcgccgcggcgtggggactaggctcgggcgcgcgtcctcggcggcggtgcg

SEQ ID NO: 246 - DNA, 1155 bp, Homo sapiens
  misc_feature: cyclin A2
  misc_feature (69)..(74): n is a, c, g, or t
  misc_feature (76)..(76): n is a, c, g, or t
  misc_feature (92)..(99): n is a, c, g, or t
  misc_feature (689)..(689): n is a, c, g, or t
  misc_feature (987)..(989): n is a, c, g, or t
  misc_feature (993)..(994): n is a, c, g, or t
  misc_feature (1096)..(1096): n is a, c, g, or t
  misc_feature (1098)..(1099): n is a, c, g, or t
  misc_feature (1129)..(1140): n is a, c, g, or t
  misc_feature (1142)..(1143): n is a, c, g, or t
tttttttttttttttaaattaataaaaaaacaaagatgctcccataatactctcagatagtgaagaagnnnnnntnatcattttggaaccannnnnnnnttttttttttttaaggtaacaaatttctggtttatttcaaatgtatacatatactcaacacttatagaggtttgctctctggttttactctcatcttgccacatgactataaacaaaaagacatccctttttcattagagatccatctgttctgtgatttttttaccttgtgatttataaaaattaggacctaaatctataatataaacttcttggatgccagtcttactcatagctgacacattttagatcctactggaaaactaagaaatgcctcttatttcaataatccaaaacttaacatactcttagtaaattcttactttgctttattcacagaacacagaccaccagtgcaaaacaagaaaaagcaccaagtaaaaagccagtgaaaagaagaaaaaagaagagagctgccaattaaagctaacagttgtatatctgtatatataactattaaaagggatatttattccattctgagaaccctgggtattttttattcacaaatccattataaaatctagcaggattttaaaaatagttttttgtttttaatgtgctttaaaataataaaccttctggagcantttctcgtctgttaatttgcatataagcttcccaccctcttccactcccaacctctgttgagtttacctcgcaaaacctaaacaaacaggttttacaaagagcgaaaaagtctggggaatctctactgtatctatctctgaatactgtattcagatatgcttagattagattatgcccaagtcagcaaattgatccagttgcttaggaaaatgaatgtcagaatttgagggtctgttttcctaaacctactttaattttagaggaaggcttttcacttcccattatatagtaaaccannntaannttctttactaagcaaaatcctgaagaagttaaatttgacttgcaaagttttccaaatcaatttattatcctgacagctggcatcattaatactttaacaaancnncttaaaattagccaaatatctaagacagannnnnnnnnnnntnnatatacaaagat

SEQ ID NO: 247 - DNA, 1062 bp, Homo sapiens
  misc_feature: ribonuclease, RNase A family, k6
  misc_feature (4)..(4): n is a, c, g, or t
  misc_feature (6)..(6): n is a, c, g, or t
  misc_feature (1023)..(1026): n is a, c, g, or t
ggcntncctgtatacatgtgataatgatactgttttaaagaacaggtgtgaaagtctaagagtttaatccagactctgcacaagaagttaatctgccaaaccctaggattctccttctgaaagctcagaatatttcttccccttccctatacacacagggctcgaagggttagagaagaaaggcagacaacagcttctgagctttggactaatcacagcctctgttctcagcaggagccccaacactgagaccagaaaagatggtgctatgctttcctcttcttttactgctgctggttctatggggaccagtgtgtccacttcatgcttggcctaagcgtctcaccaaggctcactggtttgaaattcagcatatacagccaagtcctctccaatgcaacagggcaatgagtggcatcaacaattatacccagcactgtaagcatcaaaatacctttctgcatgactctttccagaatgtggctgctgtctgtgatttgctcagcattgtctgcaaaaatcgtcggcacaactgccaccagagctcaaagcctgtcaacatgactgactgcagactcacttcaggaaagtatccccagtgccgctatagtgctgctgcccagtacaaattcttcattgttgcctgtgacccccctcagaagagcgatcccccctacaagttggttcctgtacacttagatagtattctctaaggcatccactgcatttcctttcatttgacatagcttctgttacaattgcatccacgttttcttttcttttgttgattttcttgttcccgtagaagaaagaagaaaggtgtttggagaattcgagtgcctaggatgccagaccagagttgagacaaaaagaaataagattattttctgctttgtagttctgtacttttcgagagaagggaatagggaagacagcaaagaaagattcagatttctaaccctgcaacttttgccaagctttattgccctgtgttcacagcaataaaaccacttcctgctgcannnnaaaaaaaaaaaaaaaaaaaaaaaaaaaaaaaaaaaa

SEQ ID NO: 248 - DNA, 753 bp, Homo sapiens
  misc_feature: poly(A) binding protein interacting protein 1 /// similar to poly(A) binding protein interacting protein 1 isoform 1; polyadenylate binding protein-interacting protein 1; PABC1-interacting protein 1
  misc_feature (241)..(243): n is a, c, g, or t
  misc_feature (245)..(249): n is a, c, g, or t
  misc_feature (251)..(251): n is a, c, g, or t
  misc_feature (253)..(254): n is a, c, g, or t
  misc_feature (257)..(259): n is a, c, g, or t
  misc_feature (261)..(264): n is a, c, g, or t
  misc_feature (280)..(281): n is a, c, g, or t
  misc_feature (450)..(450): n is a, c, g, or t
cccttggtatcaaatacatctgcaatatgtaaatccattgttgaatatattcccaagacttttatgcttaaagatttttcaagatatgaatcaatattgatattcaattcacttgggacacttaaatgtcaaactaaaatgaaagctataatactcctacctaaaaaggatgctacatttttgcagtaatatgtatttccagacgaagactttttcccctcaagaaaagtagaatttaaannntnnnnntntnnttnnntnnnnaaattttcaacatttnntttatttcaaaatcgattttattgcagccaaaacagtagaattaactgtacataataaactattatatatatatacacattttaagttatagggaataaagtttattttggcagatagtgttaaacaaaattaaagttgcatacattagtaacataactcaacatcctnaatttggtatagatgtgacacattttcttgctctcttgtgttctgctaaatcaccatacctaaactgctttataaaactgatatgctgaaatttaactttactgttttcgcttacgctctgattccaaacaaaacttttcataagcttcttctatctctgggtccatctcatcatcaatatcatccaagtatggatcaccagccccggataaatctgttccattttcttcataatctggaaaaaagtcctctctttcaagtaattcttggtatttctcttggtaatctggatcagctgcagtg

SEQ ID NO: 249 - DNA, 480 bp, Homo sapiens
  misc_feature: pro-platelet basic protein (chemokine (C-X-C motif) ligand 7)
  misc_feature (12)..(12): n is a, c, g, or t
  misc_feature (304)..(304): n is a, c, g, or t
  misc_feature (311)..(311): n is a, c, g, or t
  misc_feature (315)..(315): n is a, c, g, or t
  misc_feature (341)..(341): n is a, c, g, or t
  misc_feature (422)..(422): n is a, c, g, or t
tttttaggcaanaattagagggttgaaaccaggcttatttattttcatcttctttctgccatcttttaaccaaccttctcagaataaaatgtgatttttgagacagaatgaaacacatatccaaattttaatacagtaagaataggtatcctgaataaatgagaactctagaaaatcaaggtttcaaaattctacccttcctgggagttaaagaagtttggcagaaacagaacaaattaatcagcagattcatcacctgccaattttttctgtacaattttcttgattctgggagcatctgggntccaggncagnattttcctcccatccttcagtgtggntatcacttcgacttggttgcaatgggttcctttcccgatcacttccaaactttggatgtttttgggatgaattccagaggntgtctttatacacatgcagcggagttcagcatacaagtcactgtctaaactttcctct

SEQ ID NO: 250 - DNA, 1967 bp, Homo sapiens
  misc_feature: serine hydroxymethyltransferase 2 (mitochondrial)
  misc_feature (33)..(33): n is a, c, g, or t
  misc_feature (35)..(35): n is a, c, g, or t
  misc_feature (38)..(52): n is a, c, g, or t
  misc_feature (54)..(54): n is a, c, g, or t
  misc_feature (56)..(58): n is a, c, g, or t
  misc_feature (61)..(61): n is a, c, g, or t
  misc_feature (63)..(65): n is a, c, g, or t
  misc_feature (128)..(128): n is a, c, g, or t
  misc_feature (132)..(134): n is a, c, g, or t
  misc_feature (760)..(761): n is a, c, g, or t
  misc_feature (1092)..(1092): n is a, c, g, or t
  misc_feature (1614)..(1614): n is a, c, g, or t
  misc_feature (1635)..(1635): n is a, c, g, or t
  misc_feature (1638)..(1638): n is a, c, g, or t
  misc_feature (1641)..(1642): n is a, c, g, or t
  misc_feature (1649)..(1649): n is a, c, g, or t
  misc_feature (1657)..(1657): n is a, c, g, or t
  misc_feature (1688)..(1688): n is a, c, g, or t
  misc_feature (1701)..(1701): n is a, c, g, or t
  misc_feature (1718)..(1718): n is a, c, g, or t
  misc_feature (1720)..(1720): n is a, c, g, or t
  misc_feature (1738)..(1738): n is a, c, g, or t
  misc_feature (1777)..(1777): n is a, c, g, or t
  misc_feature (1818)..(1818): n is a, c, g, or t
  misc_feature (1825)..(1825): n is a, c, g, or t
  misc_feature (1846)..(1846): n is a, c, g, or t
  misc_feature (1848)..(1849): n is a, c, g, or t
  misc_feature (1853)..(1854): n is a, c, g, or t
  misc_feature (1858)..(1859): n is a, c, g, or t
  misc_feature (1861)..(1861): n is a, c, g, or t
  misc_feature (1864)..(1865): n is a, c, g, or t
  misc_feature (1875)..(1876): n is a, c, g, or t
  misc_feature (1878)..(1878): n is a, c, g, or t
  misc_feature (1880)..(1880): n is a, c, g, or t
  misc_feature (1893)..(1893): n is a, c, g, or t
  misc_feature (1898)..(1898): n is a, c, g, or t
  misc_feature (1910)..(1910): n is a, c, g, or t
  misc_feature (1919)..(1919): n is a, c, g, or t
  misc_feature (1921)..(1921): n is a, c, g, or t
  misc_feature (1930)..(1930): n is a, c, g, or t
gcctcagcgagctcttctcgcgcatgcgttctngnaannnnnnnnnnnnnnncngnnngcngnnnctagaccagagttggtggctggacctcctgcgacttccgagttgcgatgctgtacttctcttngttnnngggcggctcggcctctgcagagatgtgggcagctggtcaggatggccattcgggctcagcacagcaacgcagcccagactcagactggggaagcaaacaggggctggacaggccaggagagcctgtcggacagtgatcctgagatgtgggagttgctgcagagggagaaggacaggcagtgtcgtggcctggagctcattgcctcagagaacttctgcagccgagctgcgctggaggccctggggtcctgtctgaacaacaagtactcggagggttatcctggcaagagatactatgggggagcagaggtggtggatgaaattgagctgctgtgccagcgccgggccttggaagcctttgacctggatcctgcacagtggggagtcaatgtccagccctactccgggtccccagccaacctggccgtctacacagcccttctgcaacctcacgaccggatcatggggctggacctgcccgatgggggccatctcacccacggctacatgtctgacgtcaagcggatatcagccacgtccatcttcttcgagtctatgccctataagctcaaccccaaaactggcctcattgactacaaccagctggcactgactgctcgacttttnnccggccacggctcatcatagctggcaccagcgcctatgctcgcctcattgactacgcccgcatgagagaggtgtgtgatgaagtcaaagcacacctgctggcagacatggcccacatcagtggcctggtggctgccaaggtgattccctcgcctttcaagcacgcggacatcgtcaccaccactactcacaagactcttcgaggggccaggtcagggctcatcttctaccggaaaggggtgaaggctgtggaccccaagactggccgggagatcccttacacatttgaggaccgaatcaactttgccgtgttcccatccctgcaggggggnccccacaatcatgccattgctgcagtagctgtggccctaaagcaggcctgcacccccatgttccgggagtactccctgcaggttctgaagaatgctcgggccatggcagatgccctgctagagcgaggctactcactggtatcaggtggtactgacaaccacctggtgctggtggacctgcggcccaagggcctggatggagctcgggctgagcgggtgctagagcttgtatccatcactgccaacaagaacacctgtcctggagaccgaagtgccatcacaccgggcggcctgcggcttggggccccagccttaacttctcgacagttccgtgaggatgacttccggagagttgtggactttatagatgaaggggtcaacattggcttagaggtgaagagcaagactgccaagctccaggatttcaaatccttcctgcttaaggactcagaaacaagtcagcgtctggccaacctcaggcaacgggtggagcagtttgccagggccttccccatgcctggnttttgatgagcattgaaggcnccntgnnaaatgangcccacanactcaaagttactctccttccccctacctgngccagtgaaatangaaagcctttctatttntnggtgcgggagggaagacntctcacttagggcaagagccaggtatagtctcccttccnagaatttgtaactgagaagatcttttctttttccttttttntggtaancaagacttagaaggagggccnanncacnnttcnntntgnncccccgctcnnantnatcacagtgtcanagacncgtcctctttcntggggaagntngaggagtgnccttcagagccagtaacaggcaggggtggatagcacc

SEQ ID NO: 251 - DNA, 1621 bp, Homo sapiens; identical to SEQ ID NO: 30
  misc_feature: interferon-induced protein 44
  misc_feature (677)..(678): n is a, c, g, or t
  misc_feature (699)..(699): n is a, c, g, or t
  misc_feature (701)..(701): n is a, c, g, or t
  misc_feature (713)..(713): n is a, c, g, or t
  misc_feature (836)..(836): n is a, c, g, or t
  misc_feature (840)..(840): n is a, c, g, or t
  misc_feature (854)..(854): n is a, c, g, or t
  misc_feature (1077)..(1077): n is a, c, g, or t
  misc_feature (1445)..(1445): n is a, c, g, or t
  misc_feature (1465)..(1465): n is a, c, g, or t
  misc_feature (1467)..(1468): n is a, c, g, or t
  misc_feature (1481)..(1481): n is a, c, g, or t
  misc_feature (1483)..(1483): n is a, c, g, or t
  misc_feature (1490)..(1490): n is a, c, g, or t
  misc_feature (1534)..(1534): n is a, c, g, or t

SEQ ID NO: 252 - DNA, 759 bp, Homo sapiens
  misc_feature: killer cell lectin-like receptor subfamily B, member 1 /// killer cell lectin-like receptor subfamily B, member 1
  misc_feature (4)..(7): n is a, c, g, or t
  misc_feature (566)..(566): n is a, c, g, or t
tgcnnnncagaattgagagtttgttcttacacacaagtttaatgccaccttcctctgtctgccatggaccaacaagcaatatatgctgagttaaacttacccacagactcaggcccagaaagttcttcaccttcatctcttcctcgggatgtctgtcagggttcaccttggcatcaatttgccctgaaacttagctgtgctgggattattctccttgtcttggttgttactgggttgagtgtttcagtgacatccttaatacagaaatcatcaatagaaaaatgcagtgtggacattcaacagagcaggaataaaacaacagagagaccgggtctcttaaactgcccaatatattggcagcaactccgagagaaatgcttgttattttctcacactgtcaacccttggaataacagtctagctgattgttccaccaaagaatccagcctgctgcttattcgagataaggatgaattgatacacacacagaacctgatacgtgacaaagcaattctgttttggattggattaaatttttcattatcagaaaagaactggaagtgganaaacggctcttttttaaattctaatgacttagaaattagaggtgatgctaaagaaaacagctgtatttccatctcacagacatctgtgtattctgagtactgtagtacagaaatcagatggatctgccaaaaagaactaacacctgtgagaaataaagtgtatcctgactcttgaaaaaaaaaaaaaaaaaaa

SEQ ID NO: 253 - DNA, 1198 bp, Homo sapiens
  misc_feature: formyl peptide receptor-like 2
  misc_feature (360)..(361): n is a, c, g, or t
  misc_feature (711)..(712): n is a, c, g, or t
  misc_feature (1091)..(1091): n is a, c, g, or t
aagttaatgaatagttgtattgtaagatggtgtcacagctgagaaatggccattgctgaaatgtttcaggtgtgggaagatggaaaccaacttctccattcctctgaatgaaactgaggaggtgctccctgagcctgctggccacaccgttctgtggatcttctcattgctagtccacggagtcacctttgtcttcggggtcctgggcaatgggcttgtgatctgggtggctggattccggatgacacgcacagtcaacaccatctgttacctgaacctggccctagctgacttctctttcagtgccatcctaccattccgaatggtctcagtcgccatgagagaaaaatggccttttgnntcattcctatgtaagttagttcatgttatgatagacatcaacctgtttgtcagtgtctacctgatcaccatcattgctctggaccgctgtatttgtgtcctgcatccagcctgggcccagaaccatcgcaccatgagtctggccaagagggtgatgacgggactctggattttcaccatagtccttaccttaccaaatttcatcttctggactacaataagtactacgaatggggacacatactgtattttcaactttgcattctggggtgacactgctgtagagaggttgaacgtgttcattaccatggccaaggtctttctgatcctccacttcattattggcttcanngtgcctatgtccatcatcacagtctgctatgggatcatcgctgccaaaattcacagaaaccacatgattaaatccagccgtcccttacgtgtcttcgctgctgtggtggcttctttcttcatctgttggttcccttatgaactaattggcattctaatggcagtctggctcaaagagatgttgttaaatggcaaatacaaaatcattcttgtcctgattaacccaacaagctccttggccttttttaacagctgcctcaacccaattctctacgtctttatgggtcgtaacttccaagaaagactgattcgctctttgcccactagtttggagagggccctgactgaggtccctgactcagcccagaccagcaacacanacaccacttctgcttcacctcctgaggagacggagttacaagcaatgtgaggtcggggatatttttgggctctgtctctttctaccctgcgttaagcggaaaaaaaa

SEQ ID NO: 254 - DNA, 485 bp, Homo sapiens
  misc_feature: chemokine (C motif) ligand 1 /// chemokine (C motif) ligand 2
cagctcagcgggacctcagccatgagacttctcatcctggccctccttggcatctgctctctcactgcatacattgtggaaggtgtagggagtgaagtctcacataggaggacctgtgtgagcctcactacccagcgactgccagttagcagaatcaagacctacaccatcacggaaggctccttgagagcagtaatttttattaccaaacgtggcctaaaagtctgtgctgatccacaagccacgtgggtgagagacgtggtcaggagcatggacaggaaatccaacaccagaaataacatgatccagaccaagccaacaggaacccagcaatcgaccaatacagctgtgaccctgactggctagtagtctctggcaccctgtccgtctccagccagccagctcatttcactttacaccctcatggactgagattatactcaccttttatgaaagcactgcatgaataaaattattcctttgta

SEQ ID NO: 255 - DNA, 1209 bp, Homo sapiens
  misc_feature: oncostatin M
ggtcacccccagcgggcgcgggccggagcacgggcacccagcatgggggtactgctcacacagaggacgctgctcagtctggtccttgcactcctgtttccaagcatggcgagcatggcggctataggcagctgctcgaaagagtaccgcgtgctccttggccagctccagaagcagacagatctcatgcaggacaccagcagactcctggacccctatatacgtatccaaggcctggatgttcctaaactgagagagcactgcagggagcgccccggggccttccccagtgaggagaccctgagggggctgggcaggcggggcttcctgcagaccctcaatgccacactgggctgcgtcctgcacagactggccgacttagagcagcgcctccccaaggcccaggatttggagaggtctgggctgaacatcgaggacttggagaagctgcagatggcgaggccgaacatcctcgggctcaggaacaacatctactgcatggcccagctgctggacaactcagacacggctgagcccacgaaggctggccggggggcctctcagccgcccacccccacccctgcctcggatgcttttcagcgcaagctggagggctgcaggttcctgcatggctaccatcgcttcatgcactcagtggggcgggtcttcagcaagtggggggagagcccgaaccggagccggagacacagcccccaccaggccctgaggaagggggtgcgcaggaccagaccctccaggaaaggcaagagactcatgaccaggggacagctgccccggtagcctcgagagcaccccttgccggtgaacggatgcggcaggtgctctgtggatgagaggaaccatcgcaggatgacagctcccgggtccccaaagctgttcccctcttgctactagccactgagaagtgcactttaagaggtgggagctgggcagacccctctacctcctccaggctgggagacagagtcaggctgttgcggctcccaactcagccccaagttccccaggcccagtgagggtggccgggcatgggccacgcgggaaccgactttccattgattcagggcgtctgatgacacaggctgactcatggccgggctgactgccccccttgccttgctcctcgaggcctgcgggtccttcctctcatgacttgccgggccgttgcccccagacttcctcctttcc

SEQ ID NO: 256 - DNA, 1712 bp, Homo sapiens
  misc_feature (557)..(557): n is a, c, g, or t
  misc_feature (573)..(573): n is a, c, g, or t
  misc_feature (581)..(581): n is a, c, g, or t
  misc_feature (604)..(604): n is a, c, g, or t
  misc_feature (623)..(623): n is a, c, g, or t
  misc_feature (655)..(655): n is a, c, g, or t
  misc_feature (865)..(865): n is a, c, g, or t
  misc_feature (896)..(896): n is a, c, g, or t
  misc_feature (904)..(904): n is a, c, g, or t
  misc_feature (944)..(944): n is a, c, g, or t
  misc_feature (1380)..(1380): n is a, c, g, or t
tttcctctccctttgcattaccttttattacctcatgccaggctggaatttgggaaatctgtttctattacaatgtatacattatacattaaataagattatgcacattacaaataaaattatttcaaaattaagaaattacacatagttcaattaaaattaaatttgaaaataattttatttgtgctgttctttagagcaccaacaattcatacacatgatcttcattctcatagccacttaaggtaagtattacctccattttagaggtgaagaaattaaggttcaaaataactaatttggtgatggccacatagtttttaagaacgttgagtctagcccaagagtgactggaattttcagttcacttaccaccattccagcagaatagcagagcaatttcaattttgcagtaaatcagggttaatcatcccagaactgtttgatagcaaaagactaaaacaactcaagtgcctaccaacagtggacaggttacataaaatataatgcatttgcataatgcagtacatgcaactgtgtacaggaagctctgtatngttctcatagggaaangttctccnaagatagattgttatgaaaaggncaagtgcagaaaagtctancacagtctgctacctgacaagaatgaaaaaangtgaagaaaacacgtatcattcattattgactgatatcagcaggaatgaatactgggcagatacacaagaaaaagaaaagtgaccacctgggtaagttgagggatggattctttatatataatctctttacttcaaatagtttgaaccctgtgaatgtaatacttatttaaaaaattaaacacattttgtattcagaagaacttcccctncaataatattctttctcttcattttatcctnccttatcntccccacacatgatgtagaatgtttttaataaaacaattngcggatgcagaatcaatcagtaatgtaggaatcagtaatgccatccatccacttattccttagaattggtaagtttggcaggcacttaggatcctggcatctctctgaaatgagaagcttttgcaacctcagcctccccaagtgctgggattacagatgtgagacaccagatcagcctcagaagacattttcttagtgccttttttccttctacctacaagcagtgaggttagctcttcctttgaaacggtaggggggctctgaaaagagcctttgggtttgatagcgtttccgggagctcagatacctgtcaaatcacttgcccttggccttgtggtgactctcggtcttcttaggcagaagcacggcctggatgttaggaaggacgccgccctgagcaatggtcacccggcctagcagtttgttgagctcctcngtcgttgcggatggccagctgcaagtggcgcgggatgatgcgagtcttcttgttgtcgcgagccgcgttgccggccagctccaggatctcggcggtcaggtactctaacaccgccgccaggtacaccggcgcgcctgccccaacccgctctgcgtagttgcctttacggagcaggcggtgcactcggcccaccgggaactggagaccagcgcgagaagagcgggatttcgctttggcgcgagctttgcctccttgcttaccacgtccagacattgcaatcagacaaaaatcaccaaaaccagcagcctaagctcacgagaaaacaaacaaaa

SEQ ID NO: 257 - DNA, 1802 bp, Homo sapiens
  misc_feature: CD72 antigen
  misc_feature (111)..(111): n is a, c, g, or t
  misc_feature (304)..(304): n is a, c, g, or t
  misc_feature (318)..(318): n is a, c, g, or t
tggcagtcacagagggaacacagagcctagttgtaaacggacagagacgagaggggcaagggaggacagtggatgacagggaagacgagtgggggcagagctgctcaggancatggctgaggccatcacctatgcagatctgagacccaggggctgatgatgatggggaaatcacctacgagaatgttcaagtgcccgcagtcctaggggtgccctcaagcttggcttcttctgtactaggggacaaagcagcggtcaagtcggagcagccaactgcgtcctggagagccgtgacgtcaccagntgtcgggcggattntcccctgccgcacaacctgcctgcgatacctcctgctcggcctgctcctcacctgcctgctgttaggagtgaccgccatctgcctgggagtgcgctgtgagtaaggctgtccctacttcccacttacaccgaacgactttcgtcccgactctcgccccaaagctgatcttcctcagcagggatcatagtcactaccaccacctccttagctttgggtttggtttccagccagggctgttgtcttcctgaattgtcctcacctaatccagtacctccttacgctttagtcagtcaaatcttgtatttcagcctgtgatgcaaaaagttgcaagaagcagaaaaagggctgatgctgcagtctcagggcactagggcagggctggagaagacatccaccaaatctctgtggccaaacagatctgcaggtgtctcagcagctccagcagacgaacagggttctggaagtcactaacagcagcctgaggcagcagctccgcctcaagataacgcagctgggacagagtgcagaggatctgcaggggtccaggagagagctggcgcagagtcaggaagcactacaggtggaacagagggctcatcaggcggccgaagggcagctacaggcctgccaggcagacagacagaagacgaaggagaccttgcaaagtgaggagcaacagaggagggccttggagcagaagctgagcaacatggagaacagactgaagcccttcttcacatgcggctcagcagacacctgctgtctgtcgggatggataatgcatcagaaaagctgcttttacatctcacttacttcaaaaaattggcaggagagccaaaaacaatgtgaaactctgtcttccaagctggccacattcagtgaaatttatccacaatcacactcttactacttcttaaattcactgttgccaaatggtggttcagggaattcatattggactggcctcagctctaacaaggattggaagttgactgatgatacacaacgcactaggacttatgctcaaagctcaaaatgtaacaaggtacataaaacttggtcatggtggacactggagtcagagtcatgtagaagttctcttccctacatctgtgagatgacagctttcaggtttccagattaggacagtcctttgcactgagttgacactcatgccaacaagaacctgtgcccctccttcctaacctgaggcctggggttcctcagaccatctccttcattctgggcagtgcccagccaccggctgacccacacctgacacttccagccagtctgctgcctgctccctcttcctgaaactggactgttcctgggaaaagggtgaagccacctctagaagggactttggcctccccccaagaacttcccatggtagaatggggtgggggaggagggcgcacgggctgagcggataggggcggcccggagccagccaggcagttttattgaaatctttttaaac

SEQ ID NO: 258 - DNA, 3039 bp, Homo sapiens
  misc_feature: nuclear receptor subfamily 4, group A, member 2
  misc_feature (2425)..(2425): n is a, c, g, or t
  misc_feature (2449)..(2449): n is a, c, g, or t
  misc_feature (2451)..(2451): n is a, c, g, or t
  misc_feature (2453)..(2453): n is a, c, g, or t
  misc_feature (2460)..(2460): n is a, c, g, or t
  misc_feature (2465)..(2465): n is a, c, g, or t
  misc_feature (2469)..(2469): n is a, c, g, or t
ttcggcacgagtgcacttcggcagagttgaatgaatgaagagagacgcggagaactcctaaggaggagattggacaggctggactccccattgcttttctaaaaatcttggaaactttgtccttcattgaattacgacactgtccacctttaatttcctcgaaaacgcctgtaactcggctgaagcttcagtacctttatggacaactacagcacaggctacgacgtcaagccaccttgcttgtaccaaatgcccctgtccggacagcagtcctccattaaggtagaagacattcagatgcacaactaccagcaacacagccacctgcccccccagtctgaggagatgatgccgcactccgggtcggtttactacaagccctcctcgcccccgacgcccaccaccccgggcttccaggtgcagcacagccccatgtgggacgacccgggatctctccacaacttccaccagaactacgtggccactacgcacatgatcgagcagaggaaaacgccagtctcccgcctctccctcttctcctttaagcaatcgccccctggcaccccggtgtctagttgccagatgcgcttcgacgggcccctgcacgtccccatgaacccggagcccgccggcagccaccacgtggtggacgggcagaccttcgctgtgcccaaccccattcgcaagcccgcgtccatgggcttcccgggcctgcagatcggccacgcgtctcagctgctcgacacgcaggtgccctcaccgccgtcgcggggctccccctccaacgaggggctctgcgctgtgtgtggggacaacgcggcctgccaacactacggcgtgcgcacctgtgagggctgcaaaggcttctttaagcgcacagtgcaaaaaaatgcaaaatacgtgtgtttagcaaataaaaactgcccagtggacaagcgtcgccggaatcgctgtcagtactgccgatttcagaagtgcctggctgttgggatggtcaaagaagtggttcgcacagacagtttaaaaggccggagaggtcgtttgccctcgaaaccgaagagcccacaggagccctctcccccttcgcccccggtgagtctgatcagtgccctcgtcagggcccatgtcgactccaacccggctatgaccagcctggactattccaggttccaggcgaaccctgactatcaaatgagtggagatgacacccagcatatccagcaattctatgatctcctgactggctccatggagatcatccggggctgggcagagaagatccctggcttcgcagacctgcccaaagccgaccaagacctgctttttgaatcagctttcttagaactgtttgtccttcgattagcatacaggtccaacccagtggagggtaaactcatcttttggaatgggtgggtcttgcacaggttgcaatgcgttcgtggctttggggaatggattgattccattgttgaattctcctccaacttgcagaatatgaacatcgacatttctgccttctcctgcattgctgccctggctatggtcacagagagacacgggctcaaggaacccaagagagtggaagaactccaaaacaagattgtaaattgtctcaaagaccacgtgactttcaacaatggggggttgaaccgccccaattatttgtccaaactgttggggaagctcccagaacttcgtaccctttgcacacaggggctacagcgcattttctacctgaaattggaagacttggtgccaccgccagcaataattgacaaacttttcctggacactttacctttctaagacctcctcccaagcacttcaaaggaactggaatgataatggaaactgtcaagagggggcaagtcacatgggcagagatagccgtgtgagcagtctcagctcaagctgccccccatttctgtaaccctcctagcccccttgatccctaaagaaaacaaacaaacaaacaaaaactgttgctatttcctaacctgcaggcagaacctgaaagggcattttggctccggggcatcctggatttagaacatggactacacacaatacagtggtataaactttttattctcagtttaaaaatcagtttgttgttcagaagaaagattgctataatgtataatgggaaatgtttgcccatgcttggttgttgcagttcagacaaatgtgacacacacacacatacacacacacacacacacacagagacacatcttaaggggacccacaagtattgccctttaacaagacttcaaagttttctgctgtaaagaaagctgtaatatatagtaaaactaaatgttgcgtgggtggcatgagttgaagaaggccaaggcttgtaaatttacccaatgcagtttggctttttaaattattttgtgcctatttatgaataaatattacnaattctaaaagataagtgtgtttncnanaaaaaanaaaanaaanacataaaaaagggacaagcatgttgattctaggttgaaaatgttataggcacttgctacttcagtaatgtctatattatataaatagtatttcagacactatgtagtctgttagattttataaagattggtagttatctgagcttaaacattttctcaattgtaaaataggtgggcacaagtattacacatcagaaaatcctgacaaaagggacacatagtgtttgtaacaccgtccaacattccttgtttgtaagtgttgtatgtaccgttgatgttgataaaaagaaagtttatatcttgattattttgttgtctaaagctaaacaaaacttgcatgcagcagcttttgactgtttccagagtgcttataatatacataactccctggaaataactgagcactttgaattttttttatgtctattctgtagtatttttatttggatatttctagtatggcacatgatatgagtcacttgctttttttctatggtgtatgacagttagagatgctgattttttttctgataaattctttctttgagaaagacaaatttaatgtttacaa

SEQ ID NO: 259 - DNA, 616 bp, Homo sapiens
  misc_feature: sialic acid binding Ig-like lectin 7
atgctgctgctgctgctgctgcccctgctctgggggagggagagggtggaaggacagaagagtaaccggaaggattactcgctgacgatgcagagttccgtgaccgtgcaagagggcatgtgtgtccatgtgcgctgctccttctcctacccagtggacagccagactgactctgacccagttcatggctactggttccgggcagggaatgatataagctggaaggctccagtggccacaaacaacccagcttgggcagtgcaggaggaaactcgggaccgattccacctccttggggacccacagaccaaaaattgcaccctgagcatcagagatgccagaatgagtgatgcggggagatacttctttcgtatggagaaaggaaatataaaatggaattataaatatgaccagctctctgtgaacgtgacagggtaacctgactgagtcctgggcagatgataacccccgacaccatggcctggctgcccactcctcaggggaggaaagagagatccagtatgcacccctcagctttcataagggggagcctcaggacctatcaggacaagaagccaccaacaatgagtactcagagatcaagatccccaagtaa

SEQ ID NO: 260 - DNA, 661 bp, Homo sapiens; identical to SEQ ID NO: 31
  misc_feature: chemokine (C-C motif) ligand 2

SEQ ID NO: 261 - DNA, 1278 bp, Homo sapiens
  misc_feature: Fc fragment of IgG, high affinity Ia, receptor (CD64)
cttcaatatcttgcatgttgacagatttcactgctcccaccagcttggagacaacatgtggttcttgacaactctgctcctttgggttccagttgatgggcaagtggacaccacaaaggcagtgatcactttgcagcctccatgggtcagcgtgttccaagaggaaaccgtaaccttgcactgtgaggtgctccatctgcctgggagcagctctacacagtggtttctcaatggcacagccactcagacctcgacccccagctacagaatcacctctgccagtgtcaatgacagtggtgaatacaggtgccagagaggtctctcagggcgaagtgaccccatacagctggaaatccacagaggctggctactactgcaggtctccagcagagtcttcacggaaggagaacctctggccttgaggtgtcatgcgtggaaggataagctggtgtacaatgtgctttactatcgaaatggcaaagcctttaagtttttccactggaattctaacctcaccattctgaaaaccaacataagtcacaatggcacctaccattgctcaggcatgggaaagcatcgctacacatcagcaggaatatctgtcactgtgaaagagctatttccagctccagtgctgaatgcatctgtgacatccccactcctggaggggaatctggtcaccctgagctgtgaaacaaagttgctcttgcagaggcctggtttgcagctttacttctccttctacatgggcagcaagaccctgcgaggcaggaacacatcctctgaataccaaatactaactgctagaagagaagactctgggttatactggtgcgaggctgccacagaggatggaaatgtccttaagcgcagccctgagttggagcttcaagtgcttggcctccagttaccaactcctgtctggtttcatgtccttttctatctggcagtgggaataatgtttttagtgaacactgttctctgggtgacaatacgtaaagaactgaaaagaaagaaaaagtgggatttagaaatctctttggattctggaggccaagcacttgaagctccaactcagggctgcgcttaaggacatttacatcctctgaataccaaatactaactgctagaagagaagactctgggttatactggtgcgaggctgccacagagtcttctcttctagcagttagtatttggtacttcagaggatgtgttcctgcctcgcagggtcttgcagctttacttctccttctacatgggcagcaagctttagag

SEQ ID NO: 262 - DNA, 704 bp, Homo sapiens
  misc_feature: hematological and neurological expressed 1
tgcagcggtggtcggctgttgggtgtggagtttcccagcgcccctcgggtccgaccctttgagcgttctgctccggcgccagcctacctcgctcctcggcgccatgaccacaaccaccaccttcaagggagtcgaccccaacagcaggaatagctcccgagttttgcggcctccaggtggtggatccaatttttcattaggttttgatgaaccaacagaacaacctgtgaggaagaacaaaatggcctctaatatctttgggacacctgaagaaaatcaagcttcttgggccaagtcagcaggtgccaagtctagtggtggcagggaagacttggagtcatctggactgcagagaaggaactcctctgaagcaagctccggagacttcttagatctgaagggagaaggtgatattcatgaaaatgtggacacagacttgccaggcagcctggggcagagtgaagagaagcccgtgcctgctgcgcctgtgcccagcccggtggccccggccccagtgccatccagaagaaatccccctggcggcaagtccagcctcgtcttgggttagctctgactgtcctgaacgctgtcgttctgtctgtttcctccatgcttgagaactgcacaacttgagcctgactgtacatcttcttggatttgtttcattaaaaagaagcactttatgtaaaaaaaaaaaaaaaaaa

SEQ ID NO: 263 - DNA, 4577 bp, Homo sapiens
  misc_feature: alpha-2-macroglobulin
gctacaatccatctggtctcctccagctccttctttctgcaacatggggaagaacaaactccttcatccaagtctggttcttctcctcttggtcctcctgcccacagacgcctcagtctctggaaaaccgcagtatatggttctggtcccctccctgctccacactgagaccactgagaagggctgtgtccttctgagctacctgaatgagacagtgactgtaagtgcttccttggagtctgtcaggggaaacaggagcctcttcactgacctggaggcggagaatgacgtactccactgtgtcgccttcgctgtcccaaagtcttcatccaatgaggaggtaatgttcctcactgtccaagtgaaaggaccaacccaagaatttaagaagcggaccacagtgatggttaagaacgaggacagtctggtctttgtccagacagacaaatcaatctacaaaccagggcagacagtgaaatttcgtgttgtctccatggatgaaaactttcaccccctgaatgagttgattccactagtatacattcaggatcccaaaggaaatcgcatcgcacaatggcagagtttccagttagagggtggcctcaagcaattttcttttcccctctcatcagagcccttccagggctcctacaaggtggtggtacagaagaaatcaggtggaaggacagagcaccctttcaccgtggaggaatttgttcttcccaagtttgaagtacaagtaacagtgccaaagataatcaccatcttggaagaagagatgaatgtatcagtgtgtggcctatacacatatgggaagcctgtccctggacatgtgactgtgagcatttgcagaaagtatagtgacgcttccgactgccacggtgaagattcacaggctttctgtgagaaattcagtggacagctaaacagccatggctgcttctatcagcaagtaaaaaccaaggtcttccagctgaagaggaaggagtatgaaatgaaacttcacactgaggcccagatccaagaagaaggaacagtggtggaattgactggaaggcagtccagtgaaatcacaagaaccataaccaaactctcatttgtgaaagtggactcacactttcgacagggaattcccttctttgggcaggtgcgcctagtagatgggaaaggcgtccctataccaaataaagtcatattcatcagaggaaatgaagcaaactattactccaatgctaccacggatgagcatggccttgtacagttctctatcaacaccaccaacgttatgggtacctctcttactgttagggtcaattacaaggatcgtagtccctgttacggctaccagtgggtgtcagaagaacacgaagaggcacatcacactgcttatcttgtgttctccccaagcaagagctttgtccaccttgagcccatgtctcatgaactaccctgtggccatactcagacagtccaggcacattatattctgaatggaggcaccctgctggggctgaagaagctctccttttattatctgataatggcaaagggaggcattgtccgaactgggactcatggactgcttgtgaagcaggaagacatgaagggccatttttccatctcaatccctgtgaagtcagacattgctcctgtcgctcggttgctcatctatgctgttttacctaccggggacgtgattggggattctgcaaaatatgatgttgaaaattgtctggccaacaaggtggatttgagcttcagcccatcacaaagtctcccagcctcacacgcccacctgcgagtcacagcggctcctcagtccgtctgcgccctccgtgctgtggaccaaagcgtgctgctcatgaagcctgatgctgagctctcggcgtcctcggtttacaacctgctaccagaaaaggacctcactggcttccctgggcctttgaatgaccaggacgatgaagactgcatcaatcgtcataatgtctatattaatggaatcacatatactccagtatcaagtacaaatgaaaaggatatgtacagcttcctagaggacatgggcttaaaggcattcaccaactcaaagattcgtaaacccaaaatgtgtccacagcttcaacagtatgaaatgcatggacctgaaggtctacgtgtaggtttttatgagtcagatgtaatgggaagaggccatgcacgcctggtgcatgttgaagagcctcacacggagaccgtacgaaagtacttccctgagacatggatctgggatttggtggtggtaaactcagcaggggtggctgaggtaggagtaacagtccctgacaccatcaccgagtggaaggcaggggccttctgcctgtctgaagatgctggacttggtatctcttccactgcctctctccgagccttccagcccttctttgtggagcttacaatgccttactctgtgattcgtggagaggccttcacactcaaggccacggtcctaaactaccttcccaaatgcatccgggtcagtgtgcagctggaagcctctcccgccttccttgctgtcccagtggagaaggaacaagcgcctcactgcatctgtgcaaacgggcggcaaactgtgtcctgggcagtaaccccaaagtcattaggaaatgtgaatttcactgtgagcgcagaggcactagagtctcaagagctgtgtgggactgaggtgccttcagttcctgaacacggaaggaaagacacagtcatcaagcctctgttggttgaacctgaaggactagagaaggaaacaacattcaactccctactttgtccatcaggtggtgaggtttctgaagaattatccctgaaactgccaccaaatgtggtagaagaatctgcccgagcttctgtctcagttttgggagacatattaggctctgccatgcaaaacacacaaaatcttctccagatgccctatggctgtggagagcagaatatggtcctctttgctcctaacatctatgtactggattatctaaatgaaacacagcagcttactccagaggtcaagtccaaggccattggctatctcaacactggttaccagagacagttgaactacaaacactatgatggctcctacagcacctttggggagcgatatggcaggaaccagggcaacacctggctcacagcctttgttctgaagacttttgcccaagctcgagcctacatcttcatcgatgaagcacacattacccaagccctcatatggctctcccagaggcagaaggacaatggctgtttcaggagctctgggtcactgctcaacaatgccataaagggaggagtagaagatgaagtgaccctctccgcctatatcaccatcgcccttctggagattcctctcacagtcactcaccctgttgtccgcaatgccctgttttgcctggagtcagcctggaagacagcacaagaaggggaccatggcagccatgtatataccaaagcactgctggcctatgcttttgccctggcaggtaaccaggacaagaggaaggaagtactcaagtcacttaatgaggaagctgtgaagaaagacaactctgtccattgggagcgccctcagaaacccaaggcaccagtggggcatttttacgaaccccaggctccctctgctgaggtggagatgacatcctatgtgctcctcgcttatctcacggcccagccagccccaacctcggaggacctgacctctgcaaccaacatcgtgaagtggatcacgaagcagcagaatgcccagggcggtttctcctccacccaggacacagtggtggctctccatgctctgtccaaatatggagccgccacatttaccaggactgggaaggctgcacaggtgactatccagtcttcagggacattttccagcaaattccaagtggacaacaacaatcgcctgttactgcagcaggtctcattgccagagctgcctggggaatacagcatgaaagtgacaggagaaggatgtgtctacctccagacctccttgaaatacaatattctcccagaaaaggaagagttcccctttgctttaggagtgcagactctgcctcaaacttgtgatgaacccaaagcccacaccagcttccaaatctccctaagtgtcagttacacagggagccgctctgcctccaacatggcgatcgttgatgtgaagatggtctctggcttcattcccctgaagccaacagtgaaaatgcttgaaagatctaaccatgtgagccggacagaagtcagcagcaaccatgtcttgatttaccttgataaggtgtcaaatcagacactgagcttgttcttcacggttctgcaagatgtcccagtaagagatctcaaaccagccatagtgaaagtctatgattactacgagacggatgagtttgcaatcgctgagtacaatgctccttgcagcaaagatcttggaaatgcttgaagaccacaaggctgaaaagtgctttgctggagtcctgttctctgagctccacagaagacacgtgtttttgtatctttaaagacttgatgaataaacactttttctggtc

SEQ ID NO: 264 - DNA, 4096 bp, Homo sapiens
  misc_feature: RAB31, member RAS oncogene family
  misc_feature (43)..(45): n is a, c, g, or t
  misc_feature (47)..(51): n is a, c, g, or t
  misc_feature (53)..(53): n is a, c, g, or t
  misc_feature (56)..(59): n is a, c, g, or t
  misc_feature (61)..(61): n is a, c, g, or t
  misc_feature (63)..(65): n is a, c, g, or t
  misc_feature (67)..(68): n is a, c, g, or t
  misc_feature (136)..(136): n is a, c, g, or t
  misc_feature (1072)..(1072): n is a, c, g, or t
  misc_feature (1077)..(1079): n is a, c, g, or t
  misc_feature (1083)..(1083): n is a, c, g, or t
  misc_feature (1446)..(1446): n is a, c, g, or t
  misc_feature (1495)..(1495): n is a, c, g, or t
  misc_feature (1574)..(1574): n is a, c, g, or t
  misc_feature (1954)..(1954): n is a, c, g, or t
  misc_feature (1982)..(1983): n is a, c, g, or t
  misc_feature (2100)..(2100): n is a, c, g, or t
  misc_feature (2204)..(2204): n is a, c, g, or t
  misc_feature (2230)..(2230): n is a, c, g, or t
  misc_feature (2569)..(2570): n is a, c, g, or t
  misc_feature (2946)..(2946): n is a, c, g, or t
  misc_feature (3067)..(3067): n is a, c, g, or t
  misc_feature (3116)..(3116): n is a, c, g, or t
  misc_feature (3301)..(3301): n is a, c, g, or t
  misc_feature (3522)..(3522): n is a, c, g, or t
  misc_feature (3597)..(3597): n is a, c, g, or t
  misc_feature (3600)..(3600): n is a, c, g, or t
  misc_feature (4028)..(4028): n is a, c, g, or t
  misc_feature (4030)..(4036): n is a, c, g, or t
  misc_feature (4038)..(4040): n is a, c, g, or t
  misc_feature (4042)..(4042): n is a, c, g, or t
ggccggcggcaagtgacccaccgcggcggggccggcggcccannnannnnngnggnnnngntnnngnncgcgggcggcgcgagcgaggggcagaggcgagagacgccggcggggcgcgggcgcggcggccccgganggatgctgctgagccccggcactgcctggctgcgagcacatgatggcgatacgggagctcaaagtgtgccttctcggggacactggggttgggaaatcaagcatcgtgtgtcgatttgtccaggatcactttgaccacaacatcagccctactattggggcatcttttatgaccaaaactgtgccttgtggaaatgaacttcacaagttcctcatctgggacactgctggtcaggaacggtttcattcattggctcccatgtactatcgaggctcagctgcagctgttatcgtgtatgatattaccaagcaggattcattttataccttgaagaaatgggtcaaggagctgaaagaacatggtccagaaaacattgtaatggccatcgctggaaacaagtgcgacctctcagatattagggaggttcccctgaaggatgctaaggaatacgctgaatccataggtgccatcgtggttgagacaagtgcaaaaaatgctattaatatcgaagagctctttcaaggaatcagccgccagatcccacccttggacccccatgaaaatggaaacaatggaacaatcaaagttgagaagccaaccatgcaagccagccgccggtgctgttgacccaagggccgtggtccacggtacttgaagaagccagagcccacatcctgtgcactgctgaaggaccctacgctcggtggcctggcacctcactttgagaagagtgagcacactggctttgcatcctggaagacctgcagggggcggggcaggaaatgtacctgaaaaggattttagaaaaccctgggaaaacccaccacaccaccaccacaaaatggcctttagtgtatgaaatgcacatggaggggatgtagttgcatttttgctaaaaaaaaaaaaaaaaacctttaaaaattgttggatgtgtanaaaannnttantgccttattatgtgtatgggattctaaagtggcattccacttggatttcctgtgctacctatcccaaattcccagtaactacttcagtgtcattgcctttgttacctaaccaaccttcactgaaaggcaaatttagttcaggaggttagtttttagctagctttggaagtaagcctttatttattactttttggaggaaatcagagaagtgtcaatggaccgtcactcagactgagacttgagttattacagaagccaggaaaagtgtattagaaactgttgtctacaccacttttaattggtgaacaatttttctaagttatggtcatatatacccaaacaaaccaaatcaaactaaattantgcatataattttgggattgggtggcctagtttgaaagagtgatttaantaatcactatgtaagtggtgagagatgcaggacatacacattattcaagagaccacctgacatgcatctcctccgcagnaatacattcgtcctctcttagagaagtttaacgcacatagtattattttactaagagaatatctcttggtgtcatatctaggggaagagaattaactagaattaaatttaatgtttgaatctaaatcattgggcaaacttctaataataacaattaataataggttacaggaaagccagccagaggaagtgtcagcactttaaaattctagaccccaaaaaactacaaaatcagaaaaagtatttttatgtttctagcttgaggagaagggctttagggctaaccagaggtctgaccctagaatgccaaggaactgagaatgggctccgatgaaaaccttccttttcagattccctgtctgctcaattaaagatgtttgnatccaaaggaagtcaaggaagaaaaagnntggaaaggaagagaactgattcctactgaaaattcaaattctattaccattctaactttcataaaaagttgggatcaagaagcagctgatttcctgccagggcttatattagggggntgattcttaaaggacattaggattggtgctcagaaatggttaatcatgctgtgtgctagccagggccagctggtaccttctttgccatgagcattcaagggacngctaacctttattgacaatctatatngcaaaagtcaggaaagaggttgtgagctgattggattaaagacctggcacttcagtaactcagcacgcttccacttcactcaacttaagagagttcattgacagtgttaggatgtgaaggctgggaaacacttattttgcttcaagagttccacttggctctcccaaataggtacctcaaaaactgttagcaagcggcatttggatgtcttgacaggggctttgcagggatttttagggttttttccacattgtccacattaatggttggcatgattgtgcttgcaggccaagaaatgatcataccccttgccaaaggtaaaaaaaaaaaaaaaaaaanntgagttgaaaattgaagtgacctctttccagctgacttgcaggcttattttgtaacctttcctcatccagttttccctgagaacctgggtttatctctagatagctgttcaggttttttagctgaggggtaagtatcctagctgagagttttgcatctttgggctgggtttgcagtggttgtgttttgcataaaatgtctagtctttgccacagatagtgagctacccactaatgagcccatggttttatttcagaagcacatgagggtgtgaaaccactctgttacctttctgtattgtcttagctattcaagccagtcagaggataatatatatattctcatcagcactcagagtagtcagtgaagagagtagnatcacacttggggcacaccaggattcacataaacattgtatcttctctgtggatgctcaggccttgtctacaatgaggctttacaaccttcctttgttttggctcgggattacttcctggnctgtctaataattgaaccataaccatgtaatattatgtaaaggcctggnaaattactgttgctaaaaaaagtcatgtagtttcatgtagtgtagcatccttggcatcgttttccaaaatttgttccttctcccttttttttttctttcgtgtgtggcatgagtgtgtatctgtgtaaatatgattgtatatgtgttactccgatatgtaatccatttcactggctgagtttggncccctagccatgtgttaatataaagtagggcatgggcttcccaatggaaatctctgagaatgacagtggagttgtgcaagcattttacattgccacataattgacttgccattttatggttaaaaacgggcacattaggcagttgaatatgacgttaccttgcagactaaaaggttgaaggcccgaaactaacttttagctaacaataagggctgtgcccnaatggaaactgagttcattttctgagaaaggtttggatgactgaaatatttcctctacagtcaaggactttggcntgnggtggctgaaactgagcttttttgtgtgggctccagttctcactgttctgcaatgctcatggcaagttgaatggtgagctagcttataaattaaagagctctgaactgtattcagaccgactgggtatctagcttactgttttaacatcattgttgaaaccagaccctgtagtccagtggtgctgccctgttgtgcaaactgctcctttttctcgtgtttttgtaaagagcttccatctgggctggacccagttcttgcacatacaagacaccgctgcagtcagctaggacctttccgccatgtattctattctgtagtaaagcatttccatcaacaatgcctaattgtatctgttatttttggtttaacacacactgattcatactaataaatattttcagttttaaaaaaaaaaaaaaaaaaaaanannnnnnngnnncngtaccccattcgccctattgggagtcgtattacaattcactggccggcgtttta

SEQ ID NO: 265 - DNA, 741 bp, Homo sapiens
  misc_feature: SNARE protein Ykt6
gctgcttccctgagaacgggtcccgcagctgggcaggcgggcggcctgagggccggaccatgaagctgtacagcctcagcgtcctctacaaaggcgaggccaaggtggtgctgctcaaagccgcatacgatgtgtcttccttcagctttttccagagatccagcgttcaggaattcatgaccttcacgagtcaactgattgtggagcgctcatcgaaaggcactagagcttctgtcaaagaacaagactatctgtgccacgtctacgtccggaatgatagtcttgcaggtgtggtcattgctgacaatgaatacccatcccgggtggcctttaccttgctggagaaggtactagatgaattctccaagcaagtcgacaggatagactggccagtaggatcccctgctacaatccattacccagccctggatggtcacctcagtagataccagaacccacgagaagctgatcccatgactaaagtgcaggccgaactagatgagaccaaaatcattctgcacaacaccatggagtctctgttagagcgaggtgagaagctagatgacttggtgtccaaatccgaggtgctgggaacacagtctaaagccttctataaaactgcccggaaacaaaactcatgctgtgccatcatgtgatgcagcctccagaggcccaatgctggaatggcaccatcattcacatcagaactgcagcccctggaaaagaagagacatcgttcct

SEQ ID NO: 266 - DNA, 1996 bp, Homo sapiens
  misc_feature: SKB1 homolog (S. pombe)
atggcggcgatggcggtcgggggtgctggtgggagccgcgtgtccagcgggagggacctgaattgcgtccccgaaatagctgacacactaggggctgtggccaagcaggggtttgatttcctctgcatgcctgtcttccatccgcgtttcaagagggagttcattcaggaacctgctaagaatcggcccggtccccagacacgatcagacctactgctgtcaggaagggactggaatacgctaattgtgggaaagctttctccatggattcgtccagactcaaaagtggagaaaattcgcaggaactccgaggcggccatgttacaggagctgaattttggtgcatatttgggtcttccagctttcctgctgccccttaatcaggaagataacaccaacctggccagagttttgaccaaccacatccacactggccatcactcttccatgttctggatgcgggtacccttggtggcaccagaggacctgagagatgatataattgagaatgcaccaactacacacacagaggagtacagtggggaggagaaaacgtggatgtggtggcacaacttccggactttgtgtgactatagtaagaggattgcagtggctcttgaaattggggctgacctcccatctaatcatgtcattgatcgctggcttggggagcccatcaaagcagccattctccccactagcattttcctgaccaataagaagggatttcctgttcttttcaagatgcaccagaggctcatcttccggctcctcaagttggaggtgcagttcatcatcacaggcaccaaccaccactcagagaaggagttctgctcctacctccaatacctggaatacttaagccagaaccgtcctccacctaatgcctatgaactctttgccaagggctatgaagactatctgcagtccccgcttcagccactgatggacaatctggaatctcagacatatgaagtgtttgaaaaggaccccatcaaatactctcagtaccagcaggccatctataaatgtctgctagaccgagtaccagaagaggagaaggataccaatgtccaggtactgatggtgctgggagcaggacggggacccctggtgaacgcttccctgcgggcagccaagcaggccgaccggcggataaagctgtatgctgtggagaaaaacccaaatgccgtggtgacgctagagaactggcagtttgaagaatggggaagccaagtgaccgtagtctcatcagacatgagggaatgggtggctccagagaaagcagacatcattgtcagtgagcttctgggctcatttgctgacaatgaattgtcgcctgagtgcctggatggagcccagcacttcctaaaagatgatggtgtgagcatccccggggagtacacttcctttctggctcccatctcttcctccaagctgtacaatgaggtccgagcctgtagggagaaggaccgtgaccctgaggcccagtttgagatgccttatgtggtacggctgcacaacttccaccagctctctgcaccccagccctgtttcaccttcagccatcccaacagagatcctatgattgacaacaaccgctattgcaccttggaatttcctgtggaggtgaacacagtactacatggctttgcggtctactttgagactgtgctttatcaggacatcactctgagtatccgtccagagactcactctcctgggatgttctcatggtttcccatcctcttccctattaagcagcccataacggtacgtgaaggccaaaccatctgtgtgcgtttctggcgatgcagcaattccaagaaggtgtggtatgagtgggctgtgacagcaccagtctgttctgctattcataaccccacaggccgctcatataccattggcctctagccctgcgtgccaagtgtccagagccttggaagcagcttcaggttctgctcctgtagtacagaaggtgcagtacatctatggg

SEQ ID NO: 267 - DNA, 3763 bp, Homo sapiens
  misc_feature: tensin-like SH2 domain containing 1
acttccaagttctggtacaaggcggatatttcaagagaacaagccatcgccatgttgaaggacaaggagccgggctcattcattgttcgagacagccattccttccgaggggcttatggcctggccatgaaggtggccacgcccccaccttcagtcctgcagctgaacaagaaagctggagatttggccaatgaactcgtccggcactttttgatcgagtgtaccccgaagggagtgcggttgaaagggtgctcgaatgaaccatatttcgggagcctgacggccttggtgtgccagcattccatcacgcccttggccttgccgtgcaagctgcttatcccagagagagatccattggaggaaatagcagaaagttctccccagacggcagccaattcagcagctgagctgttgaagcagggggcagcctgcaacgtgtggtacttgaactctgtggagatggagtccctcaccggccaccaggcgatccagaaggccctgagcatcaccctggtccaggagcctccacctgtgtccacagttgtgcacttcaaggtgtcagcccagggcatcaccctgacagacaatcagaggaagctcttcttccggaggcattaccccgtgaacagtgtgattttctgtgccttggacccacaagacaggaagtggatcaaagatggcccttcctcaaaagtctttggatttgtggcccggaagcagggcagtgccacggataatgtgtgccacctgtttgcagagcatgaccctgtgcagcctgccagtgccattgtcaacttcgtatcaaaggtcatgattggttccccaaagaaggtctgagaactcccctccctccctggacccaccgatgcctctcgaagccctggagacagccgttgggtgagggtggggcccccactttttaccaaactagtaaacctgacattccaggcccatgaggggaaagaggatcttccagctctgcaaaaacaagaacaaacaacatcaccgtgaattggcctttcctgaaagtgacttatctgacacatctctgtagccacatgctttttgggtagaagaagctgggcatgggtgcaccccaccccctagggtccccatgggaaagggacatgcaaggaaacagcacagaacacgaggtggtccccatgtccctggcacactagcattctgggggatgaggaatccccagcccttgaggcagaggtgccgagtgactgccatgcttcgcccgtccgcatgggcgcttctgtccagctgcacccgaggccgggggtttccctcacctcggtcttcccaagatggagatgctaacgaaactgagaagggggcgtatgtttgacgaaggtttgtgcaagtcaggcccttctggaacacagcagggcctacaacgaggggcctttgcgatgggctgtgaggatgggggtggtgggaagaattggccacgttagagaccccatgccaccccaccatggtgagtgctctgtgcctcctgctcacctgtggtgagctgggcgagctgggcgagctgggcgagctgggctggggagagcctgtgaggaccgagaggagaaatgagaagaaggaacaaaaatattatttctatgtaatttatattttacttatgccaaattatttatgataatttgccattgctatactgtaccagtgtcaaatgctgcagcctgccaagctgtgattttgtgaggcttgtccctatgtaggatgcaccgcaggcccctggccactgaaagagtgtgcagtggactgtgggtctcccatatgcggtgccgcccaaaggtggctttgcctcaagcaacctaccctgatgttttactcattggaatgtttttccccgattgtggatgacttcttttctgatggagagagtccaggagggatggaaaactcctggatttaagctcagcatcccccacatgggcttttcgatcatcttcaggcctgaagctgcacgacctgaagttcgcctgcatttatcagcccttttgtgctgctccttgccaccttggggttcctgctggggaccatgtgtggttgtggcatgtgtgagcagaagggaggatgaggaaaaagagaagaaaccccggtactgacaagctgtttttgagtgccactgtttgccatcatctaagccactgaatcaagtgtatttcaggcttatttcaacattccaatgccctggttttcctgcttgaatctgttcgtggtcaaaggtttgggggaatttgtgaccctggaccatccccagagtgaaagatggagctgggccacatcagaataaggccttggccccatcctctcacagcctaggtgctctgcaggcatactgactgtcctgattgcgatccagcccgaaattccctcctctgctttcaaaagtcaaatcccccattcttaggccacactggtgtcacaagctcctgtcagggagctggggtttgggaatgtgctttgtgaactctgctttaaagtgaggggccgaggaaaacttagaaacaggcagagttggaagcagccaaatcacagtgggtgttgtgtgtgtgtgcgtgtgtgcatgcgtgcgtgtatgcgtgtgtgaaagcaggtggaccattccactttttagctcctattgatgcaccaaaccaagtgcctcatttctgtgccaaatgtttgccttggtcgtcgtggacctccttctctaacttgaggtggcatgactgtcaggaggtgctggcattttcagcagatcctcatgtgttgaccctgatgtctttagcagaggcctctagcatctcggtttttcatccactgcaggaatgtggccacagggagcagaggtttgtactttccccaagaggtcctcatcctgagacggtctctacccatgtttaacccaaagagtgcaggccaggttccttatccttctgatgaaggatgagagagctcatttagaagtcagagcaaactagggtctcagtattgagaaacgcagcctgccagggaatcacagagacatcggggtgcccgcgatggccctcatgaagccatgcctcgacggcattcaggaagccctgcaaacgtgctttttgaactcattggccaggtgtgatttttacacaaggtaaacgtggtcaagggcatcggggaatttgctccaagcagatagctccctctgaggaaccaaaggaagcaagtttccatgatttctgaagagctggtataggaagtttctttcttccttttgtgttacatgtgcattaaacagaacaagctgtgtgtcatcacagattgtactgtgggctcagaaaccgtgagagagcccccaccgtggacaccggctctatggccacaggaaaaggaacgtttccaggcattttgtctccagggctcccgctggacaggcacgtactgccccggggagtaaatgcggagagttcacgaactgtgcccaacgcatgttatagccagggtcctactaactactcagtaaaagaacgtattgttgtattcctccagtgttaagctatagccatgttaaaagtcactgtgcatttattctcagcatcaaataccttgtaacgtcttctctgccttgttagtgcatatttttacttttctgatactgtaaagaatatatccagtatgtaaatgaatgttctataaatcttttgtatagtcattttctctgctccttaaatatcatctctattcagagtataataaaattatgaacttggtaagcctc

SEQ ID NO: 268 - DNA, 891 bp, Homo sapiens
  misc_feature: nerve growth factor receptor (TNFRSF16) associated protein 1
accccatcccccactcctataccggtcctccattttggtgcctgcaaagctctgggaaagaatcccgggaaacgaaaaatggtgggtttgggggaagggaggtaaggggagaaagctggagggaggggctttaattggaggccccgtagaggacgcgcggaacttctaaggtgggaaaaaacgaaattaaaaaatcctttgatatcagggctctgaatcctgctggtcagagcaccaagcattcagtctctctccttgcctttgtcttacttgtgttcaaagaaaaacaaccagaaaaaaaaaatctcatcatggcaaatattcaccaggaaaacgaagagatggagcagcctatgcagaatggagaggaagaccgccctttgggaggaggtgaaggccaccagcctgcaggaaatcgacggggacaggctcgccgacttgcccctaattttcgatgggccatacccaataggcagatcaatgatgggatgggtggagatggagatgatatggaaatattcatggaggagatgagagaaatcagaagaaaacttagggagctgcagttgaggaattgtctgcgtatccttatgggggagctctctaatcaccatgaccatcatgatgaattttgccttatgccttgactcctgccatttatcatgagattaatactgtgattcccgctgttttctttttccttgcattttcctaatatgcctttactgatccgtttgctgtgaaccctatgttatttccatgtgtcaagtgggtcttgtgttgccagcttctatttgaagattgcctttgcactcagtgtaagtttctgtcagcagtagtttcacccatttgcatggaaaaatttaaagctaataaagcaatttaaaaagc

SEQ ID NO: 269 - DNA, 1192 bp, Homo sapiens
  misc_feature: ribonuclease T2
cggcgactgaccgtggtcgtgggcggacggcggcttgcagcgtggaggagctggggtcgctgtgggtcgcgaagcagagcccgggacgtgcgcgcttggtgcacgatcctgaaggggagctccgaggggcccgggtcgccagggctgctgcggccattcccggagcccggcgcggggcccgcgagatactggtttaggccgtcccagggctccgggcgcacccggtggccgctgctgcagcggagggagcgcggcggcgcgggggctcggagacagcgtttctcccggaagtcttcctcgggcagcaggtgggaagtgggagccggagcggcagctggcagcgttctctccgcaggtcggcaccatgcgccctgcagccctgcgcggggccctgctgggctgcctctgcctggcgttgctttgcctgggcggtgcggacaagcgcctgcgtgacaaccatgagtggaaaaaactaattatggttcagcactggcctgagacagtatgcgagaaaattcaaaacgactgtagagaccctccggattactggacaatacatggactatggcccgataaaagtgaaggatgtaatagatcgtggcccttcaatttagaagagattaaggatcttttgccagaaatgagggcatactggcctgacgtaattcactcgtttcccaatcgcagccgcttctggaagcatgagtgggaaaagcatgggacctgcgccgcccaggtggatgcgctcaactcccagaagaagtactttggcagaagcctggaactctacagggagctggacctcaacagtgtgcttctaaaattggggataaaaccatccatcaattactaccaagttgcagattttaaagatgcccttgccagagtatatggagtgatacccaaaatccagtgccttccaccaagccaggatgaggaagtacagacaattggtcagatagaactgtgcctcactaagcaagaccagcagctgcaaaactgcaccgagccgggggagcagccgtcccccaagcaggaagtctggctggcaaatggggccgccgagagccggggtctgagagtctgtgaagatggcccagtcttctatcccccacctaaaaagaccaagcattgatgcccaagttttggaaatattctgttttaaaaagcaagagaaattcacaaactgcag

SEQ ID NO: 270 - DNA, 4674 bp, Homo sapiens
  misc_feature: pleckstrin homology-like domain, family A, member 1
  misc_feature (322)..(322): n is a, c, g, or t
  misc_feature (1917)..(1921): n is a, c, g, or t
  misc_feature (2960)..(2960): n is a, c, g, or t
  misc_feature (2962)..(2962): n is a, c, g, or t
  misc_feature (2964)..(2970): n is a, c, g, or t
  misc_feature (2972)..(2981): n is a, c, g, or t
  misc_feature (2983)..(2985): n is a, c, g, or t
  misc_feature (2987)..(2987): n is a, c, g, or t
  misc_feature (3077)..(3077): n is a, c, g, or t
  misc_feature (3281)..(3281): n is a, c, g, or t
  misc_feature (3400)..(3400): n is a, c, g, or t
  misc_feature (3503)..(3503): n is a, c, g, or t
  misc_feature (3704)..(3708): n is a, c, g, or t
  misc_feature (3721)..(3724): n is a, c, g, or t
  misc_feature (3728)..(3728): n is a, c, g, or t
  misc_feature (3754)..(3754): n is a, c, g, or t
  misc_feature (3760)..(3760): n is a, c, g, or t
  misc_feature (3801)..(3801): n is a, c, g, or t
  misc_feature (3807)..(3807): n is a, c, g, or t
  misc_feature (3824)..(3824): n is a, c, g, or t
  misc_feature (3882)..(3882): n is a, c, g, or t
  misc_feature (4015)..(4015): n is a, c, g, or t
  misc_feature (4434)..(4435): n is a, c, g, or t
  misc_feature (4438)..(4438): n is a, c, g, or t
  misc_feature (4540)..(4540): n is a, c, g, or t
  misc_feature (4559)..(4559): n is a, c, g, or t
ctccttgggcgatcgcctgggtagaggagaggagtttccggggctcgggtccgggtcgccttccaggggaacgagcgcggaagcaagtgggcggcgagaggcggagcaagagacgctggagggcgtggacgcagcgggctttggaaaggccccaagttaatgaggcgtgcgccggctgccgagcgcctcttggagctgggctttcccccgcggtgcgggcgccaggagccgccttttccgctgggtgtcactcgggggtggggaagatggcccattcaaaagcgccgcgagggggcccggccagtgcccttcagtgagcgcncgcaagaggacggcagaggcccggcagctcggagctccgggaccttgtggcgcatcaggacgcggctgtccctctgccgggacccagagccgccgccgccgctctgcctcctgcgtgttagcctcctctgcgcgctccgggcaggcggccgtgggagccgctggggcgaggacggcgcgaggctgctgctgctgcccccggcccgcgcggctggaaacggagaggccgagccaagcggcggcccctcttatgctgggaggatgctggagagtagcggctgcaaagcgctgaaggagggcgtgctggagaagcgcagcgacgggttgttgcagctctggaagaaaaagtgttgcatcctcaccgaggaagggctgctgcttatcccgcccaagcagctgcaacaccagcagcagcagcaacagcagcagcagcagcagcaacaacagcccgggcaggggccggccgagccgtcccaacccagtggccccgctgtcgccagcctcgagccgccggtcaagctcaaggaactgcacttctccaacatgaagaccgtggactgtgtggagcgcaagggcaagtacatgtacttcactgtggtgatggcagagggcaaggagatcgactttcggtgcccgcaagaccagggctggaacgccgagatcacgctgcagatggtgcagtacaagaatcgtcaggccatcctggcggtcaaatccacgcggcagaagcagcagcacctggtccagcagcagcccccctcgcagccgcagccgcagccgcagctccagccccaaccccagcctcagcctcagccgcaaccccagccccaatcacaaccccagcctcagccccaacccaagcctcagccccagcagctccacccgtatccgcatccacatccacatccacactctcatcctcactcgcacccacaccctcacccgcacccgcatccgcaccaaataccgcacccacacccacagccgcactcgcagccgcacgggcaccggcttctccgcagcacctccaactctgcctgaaaggggcagctcccgggcaagacaaggttttgaggacttgaggaagtgggacgagcacatttctattgtcttcacttggatcaaaagcaaaacagtctctccgccccgcaccagatcaagtagtttggacatcaccctactgaaaacttgcgattcttcttagttttctgcatacttttcatcacgatgcaggaaacgatttcgagtcaagaagacttttatttatgaacctttgaaaggatcgtcttgtatggtgaattttctaggagcgatgatgtactgtaattttattttaatgtattttgatttatgattatttattagttttttttaaatgcttgttctaagacatttctgaatgtagaccattttccaaaaaggaaactttattttcaaaaacctaatccgtagtaattcctaatcttggagaataaaaaagggcggtggaggggaaaacattaagaatttattcattatttctcgagtactttcagaaagtctgacactttcattgttgtgccagctggttgaaattaaaactctgatattactttnnnnnaggatttttatttttgtttttgcttaaacatatagtttgtctagaagtttaaaaagctaaaagttaaaaatggtgtaattatgaaaatctaacactcaagatagtttctaaaaggaaatcagtagttaaggatacctgatttcaaaatatttaaagcataacctaactgatggtaggatgattgtatcttgaatatgtggtagggccacatctattgtaggaaaaccttgcttttatcatctgtgtgtaaagggcttaataaggagaagaggccttttgactgatttgtgagtataaatgcatttgctgtttcatttcaaaaatgttgtggaggaaaagagtacatttaacttgtataagagaatatttgtactcctgtccaggctgcaggacctttcttcgagagctttgcacacttgacttgaaccacattttctgatccctttactttgttttagaagcacactgaaaaatctcgttgtttaaagtacaatttgtaaatatttcaaaggtctaggagtcataacttttgttttcatactgaaaatgatgttgatcagagaaaccaactgttttgcttttcattgctctgtgagaaatttgaggattctgttttgctgttaggtaagctaaactcagaaattgaaaaggaaaagactggataaacacaggattttcagtaagaaaacaaccccagtcttgtcttagaagccacttgttgaggagtctgttgggggaaaaaagaggatatgcttttaaaggtagaacaaaccttcttctgtgttaaatcaaaaggatgttcaaaatccaccaggacagatgctacttgggtttaaatggagccatagatgatacaaagtcctcttggggctgaaaatcacttcctatttgcatggctttactaactggtttctgttttccattatctttttcacagaaagtcttggtcagtatttttccagcatttaaattgaaacggtcagtattagaccactgctaggttatgtagtcaagaaataaaaatagaattacatgctananannnnnnnannnnnnnnnnannnanaaaggagttccaaggtcaaattactttttagtgcaatagttaaatgacattttgagatcataactcatatccaaaaagttgcagggaaanttaaaatagctttcccctattaagctaatggcaaacaaaacttaagtggacccccacttccagtggttgtttaggttgcagttgtgaaaatatgctgccaacatttaaaaacttgtttcatatgtatatatgtatacacatatatgaatatgtatgtatatatacatatatgagaacatgtgtgtacacatatatgaatatgtntatatgtgtatgtatgtatatatgtatatgaaatgagagccacatctaaagatttcttaaatcaagtttggttcagcttccttagaactgtggctgtactttttgaggagtacctcatnagtactatatttttaatgcatgcaaatcataatagctccaaatgaaccacagttttttcccaatggaggatttttttttaattcttgtactaaaaaaaaaaantccataccaaatatttttacaaattaagattgatgtaggttttaaaaaaggcatttgtatgttgttagcttacatatggggctaggtaatttcattgcttaaaaagatgcgcctaggctccctcttggtggctggatttctttttcttcgcccgtggtggccatggttcttaatagggccaccggaatcatggtttctttnnnnnttttttttttttnnnngganatggagtctcgccctgtgacccaggnctggantgcagtggcacgatctcggctcactgcaacctctgcctccngggttncacgccattctcctgtntcagcctcctgagtagctgggactacaggtgaatgccaccacgcccggctgattttgntatttttagtagagatggggtttcaccatagtggtcaggctgttctcgaactcctgacctcaggtgatccacctgccttggcctcccaaagtgctaggattacaggtgtgagccaccacacccggccccagantaatggtttcttgactttctgtagcccttgttccttagtctgctgtgatatttatgttgacctttatcattttctattctgaacccctcttagcatttaatgtgaaatctaagaaattagaagtagaatggcttttattgttttgacacctttgaaattattattaataatttttccagagcaaaaaagcaaacacgctcaataagactaaacaaaacaaaatataaatgtacatcatttaatgtcccagtggctctattctacctgtaagaaaatgatacaaaaccacctaagatattttgaagcctgacaaatcagcttcatggaaaaaggtaaaaaatgcatttttcaaccgaaagggcagatccaatagaagacccgctccttaaataaacataaaatgtaaaaagttggaaaannaanagtaatgttccatctggaaactgaacttttgtccttgaacttgtgttggcaccaagcctcatacacagtgagctcaataactgttgggacaaaggaaggaanggacaaaatgtgtaacttncccagcatctgggagatgctgtctcttgcctcaatgagtggtccttttctttgctctcatgtcattccctgggaacaatggaattctggacaggctaaaacatcatggatgaagt

SEQ ID NO: 271 - DNA, 3044 bp, Homo sapiens
  misc_feature: protein regulator of cytokinesis 1
gtttgcgggtggttgttgctctcggggccgtgtggagtaggtctggacctggactcacggctgcttggagcgtccgccatgaggagaagtgaggtgctggcggaggagtccatagtatgtctgcagaaagccctaaatcaccttcgggaaatatgggagctaattgggattccagaggaccagcggttacaaagaactgaggtggtaaagaagcatatcaaggaactcctggatatgatgattgctgaagaggaaagcctgaaggaaagactcatcaaaagcatatccgtctgtcagaaagagctgaacactctgtgcagcgagttacatgttgagccatttcaggaagaaggagagacgaccatcttgcaactagaaaaagatttgcgcacccaagtggaattgatgcgaaaacagaaaaaggagagaaaacaggaactgaagctacttcaagagcaagatcaagaactgtgcgaaattctttgtatgccccactatgatattgacagtgcctcagtgcccagcttagaagagctgaaccagttcaggcaacatgtgacaactttgagggaaacaaaggcttctaggcgtgaggagtttgtcagtataaagagacagatcatactgtgtatggaagaattagaccacaccccagacacaagctttgaaagagatgtggtgtgtgaagacgaagatgccttttgtttgtctttggagaatattgcaacactacaaaagttgctacggcagctggaaatgcagaaatcacaaaatgaagcagtgtgtgaggggctgcgtactcaaatccgagagctctgggacaggttgcaaatacctgaagaagaaagagaagctgtggccaccattatgtctgggtcaaaggccaaggtccggaaagcgctgcaattagaagtggatcggttggaagaactgaaaatgcaaaacatgaagaaagtgattgaggcaattcgagtggagctggttcagtactgggaccagtgcttttatagccaggagcagagacaagcttttgcccctttctgtgctgaggactacacagaaagtctgctccagctccacgatgctgagattgtgcggttaaaaaactactatgaagttcacaaggaactctttgaaggtgtccagaagtgggaagaaacctggaggcttttcttagagtttgagagaaaagcttcagatccaaatcgatttacaaaccgaggaggaaatcttctaaaagaagaaaaacaacgagccaagctccagaaaatgctgcccaagctggaagaagagttgaaggcacgaattgaattgtgggaacaggaacattcaaaggcatttatggtgaatgggcagaaattcatggagtatgtggcagaacaatgggagatgcatcgattggagaaagagagagccaagcaggaaagacaactgaagaacaaaaaacagacagagacagagatgctgtatggcagcgctcctcgaacacctagcaagcggcgaggactggctcccaatacaccgggcaaagcacgtaagctgaacactaccaccatgtccaatgctacggccaatagtagcattcggcctatctttggagggacagtctaccactcccccgtgtctcgacttcctccttctggcagcaagccagtcgctgcttccacctgttcagggaagaaaacaccccgtactggcaggcatggagccaacaaggagaacctggagctcaacggcagcatcctgagtggtgggtaccctggctcggcccccctccagcgcaacttcagcattaattctgttgccagcacctattctgagtttgcgaaggatccgtccctctctgacagttccactgttgggcttcagcgagaactttcaaaggcttccaaatctgatgctacttctggaatcctcaattcaaccaacatccagtcctgagaagccctgatcagtcaaccagctgtggcttcctgtgcctagactggacctaattatatgggggtgactttagtttttcttcagcttaggagtgcttgaaaccttggccaggttccatgaccatgggcctaacttaaagatgtgaatgagtgttacagttgaaagcccatcataggtttagtggtcctaggagacttggttttgacttatatacatgaaaagtttatggcaagaagtgcaaattttagcatatggggcctgacttctctaccacataattctacttgctgaagcatgatcaaagcttgttttatttcaccactgtaggaaaatgattgactatgcccatccctgggggtaattttggcatgtatacctgtaactagtaattaacatcttttttgtttaggcatgttcaattaatgctgtagctatcatagctttgctcttacctgaagccttgtccccaccacacaggacagccttcctcctgaagagaatgtctttgtgtgtccgaagttgagatggcctgccctactggcaaagaggtgacaggaaggctgggagcagctttgttaaattgtgttcagttctgttacacagtgcattgccctttgttgggggtatgcatgtatgaacacacatgcttgtcggaacgctttctcggcgtttgtcccttggctctcatctcccccattcctgtgcctactttgcctgagttcttctacccccgcagttgccagccagattgggagtctgtttgttccaatgggttgagctgtctttgtcgtggagatctggaactttgcacatgtcactactggggaggtgttcctgctctagcttccacgatgaggcgccctctttacctatcctctcaatcactactcttcttgaagcactattatttattcttccgctgtctgcctgcagcagtactactgtcaacatagtgtaaatggttctcaaaagcttaccagtgtggacttggtgttagccacgctgtttacctcatacagtacgtgtcctgtttttaaaatatacaattattcttaaaaataaattaaaatcgtatacttacatttcaaaaaaaaaaaaaaaaa

SEQ ID NO: 272 - DNA, 2268 bp, Homo sapiens
  misc_feature: nucleolar and spindle associated protein 1
  misc_feature (13)..(13): n is a, c, g, or t
gggatttgaaccncgctgacgaagtttggtgatccatcttccgagtatcgccgggatttcgaatcgcgatgatcatcccctctctagaggagctggactccctcaagtacagtgacctgcagaacttagccaagagtctgggtctccgggccaacctgagggcaaccaagttgttaaaagccttgaaaggctacattaaacatgaggcaagaaaaggaaatgagaatcaggatgaaagtcaaacttctgcatcctcttgtgatgagactgagatacagatcagcaaccaggaagaagctgagagacagccacttggccatgtcaccaaaacaaggagaaggtgcaagactgtccgtgtggaccctgactcacagcagaatcattcagagataaaaataagtaatcccactgaattccagaatcatgaaaagcaggaaagccaggatctcagagctactgcaaaagttccttctccaccagacgagcaccaagaagctgagaatgctgtttcctcaggtaacagagattcaaaggtaccttcagaaggaaagaaatctctctacacagatgagtcatccaaacctggaaaaaataaaagaactgcaatcactactccaaactttaagaagcttcatgaagctcattttaaggaaatggagtccattgatcaatatattgagagaaaaagaaacattttgaagaacacaattccatgaatgaactgaagcagcagcccatcaataagggaggggtcaggactccagtacctccaagaggaagactctctgtggcttctactcccatcagccaacgacgctcgcaaggccggtcttgtggccctgcaagtcagagtaccttgggtctgaaggggtcactcaagcgctctgctatctctgcagctaaaacgggtgtcaggttttcagctgctactaaagataatgagcataagcgttcactgaccaagactccagccagaaagtctgcacatgtgaccgtgtctgggggcaccccaaaaggcgaggctgtgcttgggacacacaaattaaagaccatcacggggaattctgctgctgttattaccccattcaagttgacaactgaggcaacgcagactccagtctccaataagaaaccagtgtttgatcttaaagcaagtttgtctcgtcccctcaactatgaaccacacaaaggaaagctaaaaccatgggggcaatctaaagaaaataattatctaaatcaacatgtcaacagaattaacttctacaagaaaacttacaaacaaccccatctccagacaaaggaagagcaacggaagaaacgcgagcaagaacgaaaggagaagaaagcaaaggttttgggaatgcgaaggggcctcattttggctgaagattaataattttttaatatcttgtaaatattcctgtattctcaacttttttccttttgtaaatttttttttttttgctgtcatccccactttagtcacgagatctttttctgctaactgttcatagtctgtgtagtgtccatgggttcttcatgtgctatgatctctgaaaagacgttatcaccttaaagctcaaattctttgggatggtttttacttaagtccattaacaattcaggtttctaacgagacccatcctaaaattctgtttctagatttttaatgtcaagttcccaagttccccctgctggttctaatattaacagaactgcagtcttctgctagccaatagcatttacctgatggcagctagttatgcaagcttcaggagaatttgaacaataacaagaatagggtaagctgggatagaaaggccacctcttcactctctatagaatatagtaacctttatgaaacggggccatatagtttggttatgacatcaatattttacctaggtgaaattgtttaggcttatgtaccttcgttcaaatatcctcatgtaattgccatctgtcactcactatattcacaaaaataaaactctacaactcattctaacattgcttacttaaaagctacatagccctatcgaaatgcgaggattaatgctttaatgcttttagagacagggtctcactgtgttgcccaggctggtctcaaactccaccaaatgtacttcttattcattttatggaaaagactaggctttgcttagtatcatgtccatgtttccttcacctcagtggagcttctgagttttatactgctcaagatcgtcataaataaaattttttctcattgtcaaaaaaaaaaaaaaa

SEQ ID NO: 273 - DNA, 1764 bp, Homo sapiens
  misc_feature: achalasia, adrenocortical insufficiency, alacrimia (Allgrove, triple-A)
aatctagcccgggaaccgagttgcgggagtgcggtctgtgccgttccggccaggagtttgccgactgcagacgtcctgcgaaccggcaagatgtgctctctggggttgttccctcctccaccgcctcggggtcaagtcaccctatatgagcacaataacgagctggtgacgggcagtagctatgagagcccgccccccgacttccggggccagtggatcaatcttcctgtcctacaactgacaaaggatcccctaaagacccctggaaggctggaccatggcacaagaactgccttcatccatcaccgggagcaagtgtggaagagatgcatcaacatttggcgtgatgtgggcctttttggggtgctaaatgaaattgcaaactcagaagaagaggtgtttgagtgggtgaagacggcatccggctgggccctggcactctgtcgatgggcctcttccctccatgggtccctgttcccccatctgtctctcaggagcgaagatctgatcgctgaatttgcccaagtcacaaattggtccagctgctgcttgcgtgtctttgcatggcacccccacaccaacaagtttgcagtggccctgctagatgactcagtccgtgtgtataatgccagcagcaccatagtcccctccctgaagcaccggctgcagcgaaatgtggcgtctctggcctggaagccccttagtgcctctgtcttggctgtggcctgccagagctgcattcttatctggaccctggaccctacctccttgtctacccgaccctcttctggctgtgcccaagtgctgtctcaccctgggcatacacctgttaccagcttggcctgggcccccagtggggggcggctgctctcagcttcacccgtggatgctgctatccgggtatgggatgtctcaacagagacctgtgtcccccttccctggttccgaggaggtggggtgaccaacctgctctggtccccagacggcagcaaaatcctggctaccactccttcagctgtctttcgagtctgggaggcccagatgtggacttgtgagaggtggcctactctatcagggcgctgtcagactggctgctggagcccagatggcagccgactgctgttcactgtattgggagagccactgatttactccctgtcttttccagaacgttgtggtgagggaaaggggtgcgttggaggtgcaaagtcagcaacgattgtggcagatctgtctgagacaacaatacagacaccagatggtgaggagaggcttgggggagaggctcactccatggtctgggaccccagtggggaacgtctggctgtgcttatgaaaggaaagccaagggtacaggatggtaaaccagtcatcctcctttttcgcactcgaaacagccctgtgtttgagctccttccctgtggcattatccagggggagccaggagcccagccccagctcatcactttccatccttccttcaacaaaggggccctgctcagtgtgggctggtccacaggccgaattgcccacatcccgctgtactttgtcaatgcccagtttccacgttttagcccagtgcttgggcgggcccaggaaccccctgctgggggtggaggctctattcatgacctgcccctctttactgagacatccccaacctctgccccttgggaccctctcccagggccaccacctgttctgccccactccccacattcccacctctaagaataaataagttttccttttgttttccactca

SEQ ID NO: 274 - DNA, 1290 bp, Homo sapiens
  misc_feature: BRCA2 and CDKN1A interacting protein
  misc_feature (1012)..(1012): n is a, c, g, or t
  misc_feature (1085)..(1085): n is a, c, g, or t
  misc_feature (1103)..(1103): n is a, c, g, or t
  misc_feature (1153)..(1153): n is a, c, g, or t
  misc_feature (1213)..(1213): n is a, c, g, or t
gtgagcggcaacatggcgtccaggtctaagcggcgtgccgtggaaagtggggttccgcagccgccggatcccccagtccagcgcgacgaggaagaggaaaaagaagtcgaaaatgaggatgaagacgatgatgacagtgacaaggaaaaggatgaagaggacgaggtcattgacgaggaagtgaatattgaatttgaagcttattccctatcagataatgattatgacggaattaagaaattactgcagcagctttttctaaaggctcctgtgaacactgcagaactaacagatctcttaattcaacagaaccatattgggagtgtgattaagcaaacggatgtttcagaagacagcaatgatgatatggatgaagatgaggtttttggtttcataagccttttaaatttaactgaaagaaagggtacccagtgtgttgaacaaattcaagagttggttctacgcttctgtgagaagaactgtgaaaagagcatggttgaacagctggacaagtttttaaatgacaccaccaagcctgtgggccttctcctaagtgaaagattcattaatgtccctccacagatcgctctgcccatgtaccagcagcttcagaaagaactggcgggggcacacagaaccaataagccatgtgggaagtgctacttttaccttctgattagtaagacatttgtggaagcaggaaaaaacaattccaaaaagaaacctagcaacaaaaagaaagctgcgttaatgtttgcaaatgcagaggaagaatttttctatgaggagcagggaaaacctgaggtgcttggaggtccagacacaagaagaggattggaaccagttccgatacagcacaatggtggttcacgggggcaagtgacagccctggtttctctgaaggctggactaattcaatcaagatcaactctaagtgatttccagggaaccttcatgactgttggaattgctctgtcataataagtcagggatatttagggggctcatagtntcctggagggataaaacatttcggcacctagtaatggtaaattagtcaatatttgttagtttcgtttgagatntcaaatgttaggattttntgaagtttcagtgtctttcagagtttgagataccttgttttcattttttntaatttttaatttaaaagtaataaaggatattttgtaatgattaggatgaaaattttatngtcaattataagcccaaatttgctaaaattaaagtcagtatacttggaaaaaaaaaaaaaaaaaaaaaaaaaaaaaa

SEQ ID NO: 275 - DNA, 2788 bp, Homo sapiens
  misc_feature: transforming, acidic coiled-coil containing protein 3
ggcggcggtagcagccaggcttggcccccggcgtggagcagacgcggacccctccttcctggcggcggcggcgcgggctcagagcccggcaacgggcgggcgggcagaatgagtctgcaggtcttaaacgacaaaaatgtcagcaatgaaaaaaatacagaaaattgcgacttcctgttttcgccaccagaagttaccggaagatcgtctgttcttcgtgtgtcacagaaagaaaatgtgccacccaagaacctggccaaagctatgaaggtgacttttcagacacctctgcgggatccacagacgcacaggattctaagtcctagcatggccagcaaacttgaggctcctttcactcaggatgacacccttggactggaaaactcacacccggtctggacacagaaagagaaccaacagctcatcaaggaagtggatgccaaaactactcatggaattctacagaaaccagtggaggctgacaccgacctcctgggggatgcaagcccagcctttgggagtggcagctccagcgagtctggcccaggtgccctggctgacctggactgctcaagctcttcccagagcccaggaagttctgagaaccaaatggtgtctccaggaaaagtgtctggcagccctgagcaagccgtggaggaaaaccttagttcctattccttagacagaagagtgacacccgcctctgagaccctagaagacccttgcaggacagagtcccagcacaaagcggagactccgcacggagccgaggaagaatgcaaagcggagactccgcacggagccgaggaggaatgccggcacggtggggtctgtgctcccgcagcagtggccacttcgcctcctggtgcaatccctaaggaagcctgcggaggagcacccctgcagggtctgcctggcgaagccctgggctgccctgcgggtgtgggcacccccgtgccagcagatggcactcagacccttacctgtgcacacacctctgctcctgagagcacagccccaaccaaccacctggtggctggcagggccatgaccctgagtcctcaggaagaagtggctgcaggccaaatggccagctcctcgaggagcggacctgtaaaactagaatttgatgtatctgatggcgccaccagcaaaagggcacccccaccaaggagactgggagagaggtccggcctcaagcctcccttgaggaaagcagcagtgaggcagcaaaaggccccgcaggaggtggaggaggacgacggtaggagcggagcaggagaggacccccccatgccagcttctcggggctcttaccacctcgactgggacaaaatggatgacccaaacttcatcccgttcggaggtgacaccaagtctggttgcagtgaggcccagcccccagaaagccctgagaccaggctgggccagccagcggctgaacagttgcatgctgggcctgccacggaggagccaggtccctgtctgagccagcagctgcattcagcctcagcggaggacacgcctgtggtgcagttggcagccgagaccccaacagcagagagcaaggagagagccttgaactctgccagcacctcgcttcccacaagctgtccaggcagtgagccagtgcccacccatcagcaggggcagcctgccttggagctgaaagaggagagcttcagagaccccgctgaggttctaggcacgggcgcggaggtggattacctggagcagtttggaacttcctcgtttaaggagtcggccttgaggaagcagtccttatacctcaagttcgaccccctcctgagggacagtcctggtagaccagtgcccgtggccaccgagaccagcagcatgcacggtgcaaatgagactccctcaggacgtccgcgggaagccaagcttgtggagttcgatttcttgggagcactggacattcctgtgccaggcccacccccaggtgttcccgcgcctgggggcccacccctgtccaccggacctatagtggacctgctccagtacagccagaaggacctggatgcagtggtaaaggcgacacaggaggagaaccgggagctgaggagcaggtgtgaggagctccacgggaagaacctggaactggggaagatcatggacaggttcgaagaggttgtgtaccaggccatggaggaagttcagaagcagaaggaactttccaaagctgaaatccagaaagttctaaaagaaaaagaccaacttaccacagatctgaactccatggagaagtccttctccgacctcttcaagcgttttgagaaacagaaagaggtgatcgagggctaccgcaagaacgaagagtcactgaagaagtgcgtggaggattacctggcaaggatcacccaggagggccagaggtaccaagccctgaaggcccacgcggaggagaagctgcagctggcaaacgaggagatcgcccaggtccggagcaaggcccaggcggaagcgttggccctccaggccagcctgaggaaggagcagatgcgcatccagtcgctggagaagacagtggagcagaagactaaagagaacgaggagctgaccaggatctgcgacgacctcatctccaagatggagaagatctgacctccacggagccgctgtccccgcccccctgctcccgtctgtctgtcctgtctgattctcttaggtgtcatgttcttttttctgtcttgtcttcaactttttttaaaactagattgctttgaaaacatgactcaataaaagtttcctttcaatttaaaaaaaa

SEQ ID NO: 276 - DNA, 961 bp, Homo sapiens
  misc_feature: geminin, DNA replication inhibitor
  misc_feature (130)..(130): n is a, c, g, or t
tcttctgtgcttcaccatctacataatgaatcccagtatgaagcagaaacaagaagaaatcaaagagaatataaagaatagttctgtcccaagaagaactctgaagatgattcagccttctgcatctggntctcttgttggaagagaaaatgagctgtccgcaggcttgtccaaaaggaaacatcggaatgaccacttaacatctacaacttccagccctggggttattgtcccagaatctagtgaaaataaaaatcttggaggagtcacccaggagtcatttgatcttatgattaaagaaaatccatcctctcagtattggaaggaagtggcagaaaaacggagaaaggcgctgtatgaagcacttaaggaaaatgagaaacttcataaagaaattgaacaaaaggacaatgaaattgcccgcctgaaaaaggagaataaagaactggcagaagtagcagaacatgtacagtatatggcagagctaatagagagactgaatggtgaacctctggataattttgaatcactggataatcaggaatttgattctgaagaagaaactgttgaggattctctagtggaagactcagaaattggcacgtgtgctgaaggaactgtatcttcctctacggatgcaaagccatgtatatgaaatgcattaatatttgactgttgagaattttactgccgaagtttacctccactagttctttgtagcagagtacataactacataatgccaactctggaatcaaatttccttgtttgaatcctgggaccctattgcattaaagtacaaatactatgtatttttaatctatgatggtttatgtgaataggattttctcagttgtcagccatgacttatgtttattactaaataaacttcaaactcctgttgaacattgtgtataacttagaataatgaaatataaggagtatgtgtagaaaaaaaaaa

SEQ ID NO: 277 - DNA, 4348 bp, Homo sapiens
  misc_feature: kinesin family member 4A
gggaggcccagggagaacggggaagggacatttagtttgagacggtgctgagataggatcatgaaggaagaggtgaagggaattcctgtaagagtggcgctgcgttgtcgccctctggtccccaaagagattagcgagggctgccagatgtgcctttccttcgtgcccggagagcctcaggtggtggttggtacagataaatccttcacctacgattttgtatttgatccctctactgaacaggaagaagtcttcaatacagcagtagcgccactcataaaaggtgtatttaaaggatataatgcaacggtcctggcctatgggcagactggctctggaaaaacctattcaatgggaggtgcatatactgcagagcaagagaatgaaccaacagttggggttattcctagggtaatacaactgctcttcaaagaaattgataaaaagagtgactttgaatttactctgaaagtgtcttacttagagatttacaatgaagaaattttggatcttctatgtccatctcgtgagaaagctcaaataaatatacgagaggatcctaaggaaggcataaagattgtgggactcactgagaagactgttttggttgccttggatactgtttcctgtttggaacagggcaacaactctaggactgtggcctccacggctatgaactcccagtcgtcccgatctcatgccatctttacaatctccttagagcaaggaaagaaaagtgacaagaatagcagctttcgctccaagctgcatcttgtagacctcgctggatcagaaagacagaagaaaaccaaggctgaaggggatcgtctaaaagagggtattaatattaaccgaggcctcctatgcttgggaaatgtaatcagtgctcttggagatgacaaaaagggtggctttgcgccctacagagattccaagttgactcgactgcttcaagattctctaggaggtaatagccatactcttatgatagcctgtgtgagtcctgctgactccaatctagaggaaacattaaatacccttcgctatgctgacagagcaagaaaaatcaagaacaaacctattgttaatattgatccccagacagctgaacttaatcatctaaagcaacaggtacaacagctacaagtcttgttgctacaggcccatggaggtaccctgcctggatctataactgtggaaccatcagagaatctacaatccctgatggagaagaatcagtccctggtagaggagaatgaaaaattaagtcgtggtctgagcgaggcagctggtcagacagcccagatgttggagaggatcatttggacagagcaagcgaatgaaaaaatgaacgccaagctagaagagctcaggcagcatgcggcctgcaaactggatcttcaaaagctagtggagactttggaagaccaggaattgaaagaaaatgtagagataatttgtaacctgcagcaattgattacccagttatcggatgaaactgttgcttgcatggctgcagccattgatactgcggtggagcaagaagcccaagtagaaaccagtccagagacgagcaggtcttctgacgcttttaccactcagcatgctctccgtcaagcgcagatgtctaaggagctggttgagttgaataaagcgcttgcactgaaagaggccctggctaggaagatgactcagaatgacagccaactgcagcctattcagtaccaataccaggataacataaaagagccagaattagaagtcatcaatctgcaaaaggaaaaggaagaattggttcttgaacttcagacagcaaagaaggatgccaaccaagccaagttgagtgagcgccgccgcaaacgtctccaggagctggagggtcaaattgctgatctgaagaagaaactgaatgagcagtccaaacttctgaaactaaaggaatccacagagcgtactgtctccaaactgaaccaggagatacggatgatgaaaaaccagcgggtacagttaatgcgtcaaatgaaagaagatgctgagaagtttagacagtggaagcagaaaagagacaaagaagtaatacagttaaaagaacgagaccgtaagaggcaatatgagctgctgaaacttgaaagaaacttccagaaacaatccaatgtgctcagacgtaaaacggaggaggcagcagctgccaacaagcgtctcaaggatgctctccagaaacaacgggaggttgcagataagcggaaagagactcagagccgtggaatggaaggcactgcagctcgagtgaagaattggcttggaaacgaaattgaggttatggtcagtactgaggaagccaaacgccatctgaatgacctccttgaagatagaaagatcctggctcaagatgtggctcaactcaaagaaaaaaaggaatctggggagaatccacctcctaaactccggaggcgtacattctcccttactgaagtgcgtggtcaagtttcggagtcagaagattctattacaaagcagattgaaagcctagagactgaaatggaattcaggagtgctcagattgctgacctacagcagaagctgctggatgcagaaagtgaagacagaccaaaacaacgctgggagaatattgccaccattctggaagccaagtgtgccctgaaatatttgattggagagctggtctcctccaaaatacaggtcagcaaacttgaaagcagcctgaaacagagcaagaccagctgtgctgacatgcagaagatgctgtttgaggaacgaaatcattttgccgagatagagacagagttacaagctgagctggtcagaatggagcaacagcaccaagagaaggtgctgtaccttctcagccagctgcagcaaagccaaatggcagagaagcagttagaggaatcagtcagtgaaaaggaacagcagctgctgagcacactgaagtgtcaggatgaagaacttgagaaaatgcgagaagtgtgtgagcaaaatcagcagcttctccgagagaatgaaatcatcaagcagaaactgaccctcctccaggtagccagcagacagaaacatcttcctaaggatacccttctatctccagactcttcttttgaatatgtccagcctaagccaaaaccttctcgtgttaaagaaaagttcctggagcaaagcatggacatcgaggatctaaaatattgttcagagcattctgtgaatgagcatgaggatggtgatggtgatgatgatgagggggatgacgaggaatggaagccaacaaaattagttaatgtgtccaggaagaacatccaagggtgttcctgcaagggctggtgtggaaacaagcaatgtgggtgcaggaagcaaaagtcagactgtggtgtggactgttgctgtgaccccacaaagtgtcggaaccgccagcaaggcaaggatagcttgggcactgttgaacggacccaggattcagaaagctccttcaaactggaggatcctaccgaggtgaccccaggattgagcttctttaatcccgtctgtgccacccccaatagcaagatcctgaaagagatgtgcgatgtggagcaggtgctgtcaaagaagactcccccagctccctccccttttgacctcccagagttgaaacatgtagcaacagaataccaagaaaacaaggctccagggaagaaaaagaaacgggctctggccagcaacaccagcttcttctctggctgctcccctatcgaagaagaggcccactgaagttggagtcatcatctctacccccagtctggcttgggagatgctttcaggttgcagccagaaggggttttttaaatgacttctctggatttcaggtttcttgctgttgaaaaaaggaacaaagcgttactgaaaagaaggtaacctttgttggatgtgggccttagcctccaggtccagactactactctatgttctccagaagggtgctaagtcacctactgaagagagaaccaactgactttcctattgactcatcaggaaccagtcctcagtctggtcaagttgtttcttatttgtgagcagttcaggctatctcctgatggggatgaggccaaggctttcttatcttttggttgtctctgcttaatggaggagcctggcctaggatggaggcctggcttagatctttcattccacctcaggaatgaggttgtgatctttcctgtcctgaccctctctgaattatgtttcaatagtactcttgattgtctgccatgttgttgaagcaaatgaattatttttaaatgttaagtaagtaaataaaccttagcccgtctttttttttttttttttttttttttttttt

SEQ ID NO: 278 - DNA, 6270 bp, Homo sapiens; identical to SEQ ID NO: 32
  misc_feature: 2'-5'-oligoadenylate synthetase 3, 100kDa

SEQ ID NO: 279 - DNA, 1702 bp, Homo sapiens
  misc_feature: endoplasmic reticulum chaperone SIL1, homolog of yeast
  misc_feature (1610)..(1614): n is a, c, g, or t
  misc_feature (1627)..(1629): n is a, c, g, or t
  misc_feature (1632)..(1632): n is a, c, g, or t
  misc_feature (1634)..(1635): n is a, c, g, or t
  misc_feature (1643)..(1643): n is a, c, g, or t
  misc_feature (1652)..(1652): n is a, c, g, or t
  misc_feature (1665)..(1666): n is a, c, g, or t
  misc_feature (1668)..(1668): n is a, c, g, or t
  misc_feature (1681)..(1683): n is a, c, g, or t
gttatcctgtacaggtggagctggtcgccgccgcggcgctggaattgtgggagttgtgtctgccactcggctgccggaggccgaaggtccctgactatggctccccagagcctgccttcatctaggatggctcctctgggcatgctgcttgggctgctgatggccgcctgcttcaccttctgcctcagtcatcagaacctgaaggagtttgccctgaccaacccagagaagagcagcaccaaagaaacggagagaaaagaaaccaaagccgaggaggagctggatgccgaagtcctggaggtgttccacccgacgcatgagtggcaggcccttcagccagggcaggctgtccctgcaggatcccacgtacggctgaatcttcagactggggaaagagaggcaaaactccaatatgaggacaagttccgaaataatttgaaaggcaaaaggctggatatcaacaccaacacctacacatctcaggatctcaagagtgcactggcaaaattcaaggagggggcagagatggagagttcaaaggaagacaaggcaaggcaggctgaggtaaagcggctcttccgccccattgaggaactgaagaaagactttgatgagctgaatgttgtcattgagactgacatgcagatcatggtacggctgatcaacaagttcaatagttccagctccagtttggaagagaagattgctgcgctctttgatcttgaatattatgtccatcagatggacaatgcgcaggacctgctttcctttggtggtcttcaagtggtgatcaatgggctgaacagcacagagcccctcgtgaaggagtatgctgcgtttgtgctgggcgctgccttttccagcaaccccaaggtccaggtggaggccatcgaagggggagccctgcagaagctgctggtcatcctggccacggagcagccgctcactgcaaagaagaaggtcctgtttgcactgtgctccctgctgcgccacttcccctatgcccagcggcagttcctgaagctcggggggctgcaggtcctgaggaccctggtgcaggagaagggcacggaggtgctcgccgtgcgcgtggtcacactgctctacgacctggtcacggagaagatgttcgccgaggaggaggctgagctgacccaggagatgtccccagagaagctgcagcagtatcgccaggtacacctcctgccaggcctgtgggaacagggctggtgcgagatcacggcccacctcctggcgctgcccgagcatgatgcccgtgagaaggtgctgcagacactgggcgtcctcctgaccacctgccgggaccgctaccgtcaggacccccagctcggcaggacactggccagcctgcaggctgagtaccaggtgctggccagcctggagctgcaggatggtgaggacgagggctacttccaggagctgctgggctctgtcaacagcttgctgaaggagctgagatgaggccccacaccaggactggactgggatgccgctagtgaggctgaggggtgccagcgtgggtgggcttctcaggcaggaggacatcttggcagtgctggcttggccattaaatggaaacctgaaggccnnnnnaaaaaaaaaaaannnaanannaaaaaaanaaaaaaaanaaaaaaaaaaaannanaaaaaaaaaaaannnaaaaaaaaaaaaaaaaaaa

SEQ ID NO: 280 - DNA, 3071 bp, Homo sapiens
  misc_feature: v-maf musculoaponeurotic fibrosarcoma oncogene homolog B (avian)
cgcttggctcggcgcgctccggccggccgcaaagtttcccgggcggcagcggcggctgcgcctcgcttcagcgatggccgcggagctgagcatggggccagagctgcccaccagcccgctggccatggagtatgtcaacgacttcgacctgctcaagttcgacgtgaagaaggagccactggggcgcgcggagcgtccgggcaggccctgcacacgcctgcagccagtcggctcggtgtcctccacaccgctcagcactccgtgtagctccgtgccctcgtcgcccagcttcagcccgaccgaacagaagacacacctcgaggatctgtactggatggcgagcaactaccagcagatgaaccccgaggcgctcaacctgacgcccgaggacgcggtggaagcgctcatcggctcgcacccagtgccacagccgctgcaaagcttcgacagctttcgcggcgctcaccaccaccaccatcaccaccaccctcacccgcaccacgcgtacccgggcgccggcgtggcccacgacgagctgggcccgcacgctcacccgcaccatcaccatcatcaccaagcgtcgccgccgccgtccagcgccgctagcccggcgcaacagctgcccactagccaccccgggcccgggccgcacgcgacggcctcggcgacggcggcgggcggcaacggcagcgtggaggaccgcttctccgacgaccagctcgtgtccatgtccgtgcgcgagctgaaccgccacctgcggggcttcaccaaggacgaggtgatccgcctgaagcacaagcggcggaccctgaagaaccggggctacgcccagtcttgcaggtataaacgcgtccagcagaagcaccacctggagaatgagaagacgcagctcattcagcaggtggagcagcttaagcaggaggtgtcccggctggcccgcgagagagacgcctacaaggtcaagtgcgagaaactcgccaactccggcttcagggaggcgggctccaccagcgacagcccctcctctcccgagttctttctgtgagtcgtggccggtcctggcccccgcccttgccccggcccggactccctgtcccacgtccctagtcccagactaccccggaccctgtccctgccgcggccccagccttgacctgtttgacttgagcgagagggaggaagggcgcgcgggccgcgggcgacgggcgggtgcgcgggcgggcaggggaccttggctaaggcgagagtagcgcacgccagcgccgcctcctagactcgagcagagccggagagagagacgagagggtgggaggtcccggagtaacttctctccaggctgaagggcggcgaggcatactcccgataagtcaccaaggccatctggagactcctggctttctgaactttgcgcgttaagccgggacagctgctttgctgcccggagagtagtccgcgccaggaagagagcaacgaggaaaggagagggactctggcgtcccggcaggcgagaggcgaggctgagcgaaagaaggaaggaccagacggaccctgtctgtcagagttcggagaaacactggctcctcagccctgagacacaggccctcagttagggacgctcggggcacgaggctcatcagttttattgcctgctcgattatatagaaaaatacaaaaaatctgcattaaaaatattaatcctgcatgctggacatgtatggtaataatttctattttgtaccattttcttgtttaactttagcatgttgttgatcatggatcatactccccttgtttctttgggtgagaagggatcgcagtttggaaactccggcggctgcgtgcggggtttcagtcccagctgtaggcttgtaaatacccgccccgccaaaccgcatagagaacgtggcagcaagctgagggtctttgtttgggtttattattacggtatttttgtttgtaagttaaaaagaaaaaaaaaaagaaaaagttccgggcattttgcatcagaaaacaactttgtcttggggcacacttggaagttgcatgttttctttccttcccttatccccattcggtcctctttttcctctctcgctttagttttcaaccttgttggtgctgagagagagaaccgagaggtcccagtacaagggcagggcagggcagggaagctgccaagctccgcaccccagaggagtgttctggactacagccttgtcttatggtcaaattgatacccttaataagaaaggaaaggaaaggaaaacagatcctcccctctgctttttattgtaaccagaatcaccctgaggtcccttctgaaccctctgggcctgcgctaattgtaggagccacagcgctcctagggtgagaggcttagccatccctgaccctggcagtgcactggtaagcagacactgcactgaaccaactgctatgctcagaatgtaccagaaacccaaacattggcaagtaattttgcaactttcaagtgcgttctttagaccaatgcattgcgtttctttccctgcttttgagatagtaggaagagttcttggtggtgtccccccccttcaattcttcagttgtatagtagttatagggaagatatgggtgtttttctttattattacttttttttttctgcaggtcagtaaaaggatttaagttgcactgacaaaaataccaaaataaaagtgtatttttaagttcccatttgaaattgctggcgctgctggccggatgcatttttgagtttgtattagttgataaattaacagtaataacaagattgtatgaaccgcatggtgcttgcagttttaaatattgtggatatttgtcctgcatcagaaacgagctttggtttttacagattcaactgtgttgaaatcaaacctgccgcaacagaaattgtttttatttcatgtaaaataagggatcaatttcaaaccctgcttatgatatgaaaatattaaaacctagtctattgtagttttattcagactggtttctgttttttggttattaaaatggtttcctattttgcttattaaaaaaaaaaaaaaaaaaaa

SEQ ID NO: 281 - DNA, 2690 bp, Homo sapiens
  misc_feature: dipeptidylpeptidase 3
ggccctcgggccaagattcggcacgaggcgaacggagcagctgctgcagcagggcccatggcggacacccagtacatcctgcccaatgacatcggcgtgtctagcctggactgccgtgaggccttccgcctgctgtcacccacagagcgcctctatgcctaccacctgtcccgtgccgcctggtacggaggcctggctgtgctgcttcagacctcccctgaggccccctacatctatgctctgctcagccgcctcttccgcgcccaggaccccgaccagctgcgccaacatgccctggctgaaggccttaccgaggaggagtatcaggcgttcctggtctatgccgcgggtgtttactccaacatgggcaactacaagtcctttggtgacaccaagtttgttcccaacttgcccaaggaaaagctggaacgggtgatcctagggagtgaggctgctcagcagcacccagaagaagtcaggggcctctggcatacctgcggggagcttatgttctctctggagccaaggcttcgacacctcggactggggaaggagggaatcaccacctatttctctgggaattgtaccatggaagatgccaaattggcccaggactttctggactcacagaacctcagtgcctacaacacccggctcttcaaagaggtcgatggagaagggaagccctactacgaggtgcggctggcttctgtgcttggctcagagccttccctggactctgaggtgacttccaagctgaagagctatgaattccggggaagccctttccaggtgacccggggggactacgcgcccatcctccagaaggtggtggagcagctggagaaagccaaggcctatgcagccaacagccaccaggggcagatgctggcccagtatatagagagcttcacccagggctccatcgaggcccacaagaggggctcccgcttctggatccaggacaaaggccccatcgtggagagttacatcgggttcatcgagagctaccgcgacccctttggttcccgaggagaatttgaaggtttcgtagctgtggtgaacaaggccatgagtgccaagtttgagcggctggtggcgagcgcagagcagctgctgaaggagctgccctggcccccaacctttgagaaggacaagttcctcacccctgacttcacctccctggatgttctcaccttcgctggctccggcatccctgccggcatcaacatccccaactacgatgatctgaggcagacggaaggctttaagaacgtgtcgctggggaatgtgctggctgtggcctacgccacgcagcgggagaagcttacctttctggaggaggatgacaaggacctgtacatcctctggaaggggccctccttcgatgtgcaggtgggcctgcacgagctgctgggccatggcagtggcaagctcttcgtacaggacgaaaaaggagcattcaactttgaccaggaaacagtgatcaacccagagacgggcgagcagattcagagctggtatcggagcggggagacctgggatagcaagttcagcaccatcgcctccagctacgaagagtgccgggctgagagcgtgggtctctacctctgtctccacccgcaagtgctggagatctttggctttgagggggctgatgcggaggacgtgatctacgtgaactggctcaacatggttcgggccgggctgctcgctctggagttctacacacctgaggccttcaactggcgacaggcccatatgcaggcccggtttgtgatcctgagagtcttgctggaggctggcgagggactcgttaccatcactcccaccacaggctccgatgggcgcccagatgcccgggtccgcctcgaccgcagcaagatccggtctgtgggcaagcctgctctagagcgcttcctgcggagacttcaggtgctgaagtccacaggggatgtggccggagggcgggccctgtacgaggggtatgcaacggtcactgatgcgccccccgagtgcttcctcaccctcagggacacggtgctgctgcgtaaggaatctcggaagctcattgttcagcccaacactcaccttgaaggctcagacgtgcagcttctggaatacgaggcgtcagctgctggcctcatccgatccttctctgagcgtttcccagaggatggacccgagttggaggagatcctcacacagctggccacagccgatgcccgattctggaagggccccagtgaggccccatctggccaagcttgaggaagatgtgtggccttgcccccaattccatcagaccaaggctgcaagtggccctccattcgtgtgtgtatttaggggctggggagggggaggggcaggagcttggaccttggtactacctcagctgagggtggtgacacaaccccttccatttgtcagcactttccagcctgccaattgcttcccctctgtgatctcatttcatctgcactgccatacgtggagtgagcaagacagggcttaccatcctgtctaccagatgaggaaatggcagttctgagaagtcactggtctagatcccgcaggtggcacgtgacagctagggttcaaaacgttctcaccaaatccaatgctcctcacatattaattttataaccagacaaataaatattagagacaaccaccaaaaaaaaaaaaaa

SEQ ID NO: 282 - DNA, 1118 bp, Homo sapiens
  misc_feature: purinergic receptor P2Y, G-protein coupled, 5
ctgatgaaagtgcttccaaactgaaaattggacgtgcctttacgatggtaagcgttaacagctcccactgcttctataatgactcctttaagtacactttgtatgggtgcatgttcagcatggtgtttgtgcttgggttagtatccaattgtgttgccatatacattttcatctgcgtcctcaaagtccgaaatgaaactacaacttacatgattaacttggcaatgtcagacttgctttttgtttttactttacccttcaggattttttacttcacaacacggaattggccatttggagatttactttgtaagatttctgtgatgctgttttataccaacatgtacggaagcattctgttcttaacctgtattagtgtagatcgatttctggcaattgtctacccatttaagtcaaagactctaagaaccaaaagaaatgcaaagattgtttgcactggcgtgtggttaactgtgatcggaggaagtgcacccgccgtttttgttcagtctacccactctcagggtaacaatgcctcagaagcctgctttgaaaattttccagaagccacatggaaaacatatctctcaaggattgtaattttcatcgaaatagtgggattttttattcctctaattttaaatgtaacttgttctagtatggtgctaaaaactttaaccaaaccagttacattaagtagaagcaaaataaacaaaactaaggttttaaaaatgatttttgtacatttgatcatattctgtttctgttttgttccttacaatatcaatcttattttatattctcttgtgagaacacaaacatttgttaattgctcagtagtggcagcagtaaggacaatgtacccaatcactctctgtattgctgtttccaactgttgttttgaccctatagtttactactttacatcggacacaattcagaattcaataaaaatgaaaaactggtctgtcaggagaagtgacttcagattctctgaagttcatggtgcagagaattttattcagcataacctacagaccttaaaaagtaagatatttgacaatgaatctgctgcctgaaataaaaccattaggactcactgggacagaactttcaag

SEQ ID NO: 283 - DNA, 3227 bp, Homo sapiens
  misc_feature: chromosome condensation protein G
atagaagactcctcggagagcgctgcctctgggttggcgggctggcaggctgtagccgagcgcgggcaggactcgtcccggcagggttccagagccatgggagcggaaaggaggctgctgtcgattaaggaggcctttcggctggcgcagcagccgcaccagaaccaggcgaagctggtggtggcgctgagccgcacctaccgcacgatggatgataagacagtttttcatgaggagttcattcattaccttaaatatgttatggtggtctataaacgtgaaccagctgtggagagggtaatagaatttgcagcaaagtttgttacctcatttcaccaatcagatatggaagatgatgaggaagaggaagatggtggccttttaaattatttgtttacttttctcttaaagtctcatgaagcaaacagcaatgcagtgggatttagagtgtgcctgctcataaacaagcttttgggaagtatgccagaaaatgctcagattgatgatgatgtgtttgataaaattaataaagccatgcttattagattgaaagataagattccaaatgtgagaatacaggcagttctggcgctttcacgacttcaggatcccaaggatgatgaatgcccagtggttaatgcatatgctactttgattgaaaatgattcaaatccagaagttagacgggcagtgttatcatgtattgcaccatcagcaaagactttgccaaaaattgtagggcgcaccaaggatgtgaaagaggctgtcagaaagctggcttatcaggttttagctgaaaaggttcatatgagagctatgtccattgctcagagagtaatgctccttcaacaaggtcttaatgacagatcagacgctgtgaaacaagctatgcagaagcatcttcttcaaggctggttacggttctctgaaggaaatatcttagagttgctccatcggttggatgtagaaaattcttctgaagtggcagtctctgttctcaatgccttgttttcaataactcctctcagtgaactggtgggactctgtaaaaacaatgatggcaggaaattgattccagtggaaacattaactcctgaaattgctttgtattggtgtgccctttgtgaatatttgaaatcaaaaggagatgaaggtgaagaatttttagagcagattttgccagagcctgtagtatatgcagactatttattgagttacatccagagcattccagttgttaatgaagaacacagaggtgatttttcctatattggaaatttgatgacaaaagaattcataggtcaacaattgattctaattattaagtctttggataccagtgaagaaggaggaagaaaaaaactgctggctgttttacaggagattcttattttacccacaatcccaatatccctggtttcttttcttgttgaaagactactccacatcattatagatgataataagagaacacaaattgttacagaaattatctcagagattcgagcgcccattgttactgttggtgttaataacgatccagctgatgtaagaaagaaagaactcaagatggctgaaataaaagttaagcttatcgaagccaaagaagctttggaaaattgcattaccttacaggattttaatcgggcatcagaattaaaagaagaaataaaagcattagaagatgccagaataaaccttttgaaagagacagagcaacttgaaattaaagaagtccacatagagaagaatgatgctgaaacattgcagaaatgtcttattttatgctatgaactgttgaagcagatgtccatttcaacaggcttaagtgcaaccatgaatggaatcatcgaatctttgattcttcctggaataataagtattcatcctgttgtaagaaacctggctgttttatgcttgggatgctgtggactacagaatcaggattttgcaaggaaacacttcgtattactattgcaggttttgcaaattgatgatgtcacaataaaaataagtgctttaaaggcaatctttgaccaactgatgacgttcgggattgaaccatttaaaactaaaaaaatcaaaacacttcattgtgaaggtacagaaataaacagtgatgttgagcaagaatcaagagaagttgaagagactgctacagctaagaatgttctgaaactcctttctgatttcttagatagtgaggcatctgaacttaggactggagctgcagaaggactagccaagctgatgttctctgggcttttggtcagcagcaggattctttctcgtcttattttgttatggtacaatcctgtgactgaagaggatgttcaacttcgacattgcctaggcgtgttcttccccgtgtttgcttatgcaagcaggactaatcaggaatgctttgaagaagcttttcttccaaccctgcaaacactggccaatgcccctgcatcttctcctttagctgaaattgatatcacaaatgttgctgagttacttgtagatttgacaagaccaagtggattaaatcctcaggccaagacttcccaagattatcaggccttaacagtacatgacaatttggctatgaaaatttgcaatgagatcttaacaagtccgtgctcgccagaaattcgagtctatacaaaagccttgagttctttagaactcagtagccatcttgcaaaagatcttctggttctattgaatgagattctggagcaagtaaaagataggacatgtctgagagctttggagaaaatcaagattcagttagaaaaaggaaataaagaatttggtgaccaagctgaagcagcacaggatgccaccttgactacaactactttccaaaatgaagatgaaaagaataaagaagtatatatgactccactcaggggtgtaaaagcaacccaagcatcaaagtctactcagctaaagactaacagaggacagagaaaagtgacagtttcagctaggacgaacaggaggtgtcagactgctgaagccgactctgaaagtgatcatgaagttccagaaccagaatcagaaatgaagatgagactaccaagacgagccaaaaccgcagcactagaaaaaagtaaacttaaccttgcccaatttctcaatgaagatctaagttaggaaagacgatggaggtggaatcctttaagattatgtccagttatttgctttaataaagaagaagttacccttgtcaaaatcag

SEQ ID NO: 284 - DNA, 2972 bp, Homo sapiens
  misc_feature: kinesin family member 20A
tcttcggacctaggctgccctgccgtcatgtcgcaagggatcctttctccgccagcgggcttgctgtccgatgacgatgtcgtagtttctcccatgtttgagtccacagctgcagatttggggtctgtggtacgcaagaacctgctatcagactgctctgtcgtctctacctccctagaggacaagcagcaggttccatctgaggacagtatggagaaggtgaaagtatacttgagggttaggcccttgttaccttcagagttggaacgacaggaagatcagggttgtgtccgtattgagaatgtggagacccttgttctacaagcacccaaggactcgtttgccctgaagagcaatgaacggggaattggccaagccacacacaggttcaccttttcccagatctttgggccagaagtgggacaggcatccttcttcaacctaactgtgaaggagatggtaaaggatgtactcaaagggcagaactggctcatctatacatatggagtcactaactcagggaaaacccacacgattcaaggtaccatcaaggatggagggattctcccccggtccctggcgctgatcttcaatagcctccaaggccaacttcatccaacacctgatctgaagcccttgctctccaatgaggtaatctggctagacagcaagcagatccgacaggaggaaatgaagaagctgtccctgctaaatggaggcctccaagaggaggagctgtccacttccttgaagaggagtgtctacatcgaaagtcggataggtaccagcaccagcttcgacagtggcattgctgggctctcttctatcagtcagtgtaccagcagtagccagctggatgaaacaagtcatcgatgggcacagccagacactgccccactacctgtcccggcaaacattcgcttctccatctggatctcattctttgagatctacaacgaactgctttatgacctattagaaccgcctagccaacagcgcaagaggcagactttgcggctatgcgaggatcaaaatggcaatccctatgtgaaagatctcaactggattcatgtgcaagatgctgaggaggcctggaagctcctaaaagtgggtcgtaagaaccagagctttgccagcacccacctcaaccagaactccagccgcagtcacagcatcttctcaatcaggatcctacaccttcagggggaaggagatatagtccccaagatcagcgagctgtcactctgtgatctggctggctcagagcgctgcaaagatcagaagagtggtgaacggttgaaggaagcaggaaacattaacacctctctacacaccctgggccgctgtattgctgcccttcgtcaaaaccagcagaaccggtcaaagcagaacctggttcccttccgtgacagcaagttgactcgagtgttccaaggtttcttcacaggccgaggccgttcctgcatgattgtcaatgtgaatccctgtgcatctacctatgatgaaactcttcatgtggccaagttctcagccattgctagccagcttgtgcatgccccacctatgcaactgggattcccatccctgcactcgttcatcaaggaacatagtcttcaggtatcccccagcttagagaaaggggctaaggcagacacaggccttgatgatgatattgaaaatgaagctgacatctccatgtatggcaaagaggagctcctacaagttgtggaagccatgaagacactgcttttgaaggaacgacaggaaaagctacagctggagatgcatctccgagatgaaatttgcaatgagatggtagaacagatgcaacagcgggaacagtggtgcagtgaacatttggacacccaaaaggaactattggaggaaatgtatgaagaaaaactaaatatcctcaaggagtcactgacaagtttttaccaagaagagattcaggagcgggatgaaaagattgaagagctagaagctctcttgcaggaagccagacaacagtcagtggcccatcagcaatcagggtctgaattggccctacggcggtcacaaaggttggcagcttctgcctccacccagcagcttcaggaggttaaagctaaattacagcagtgcaaagcagagctaaactctaccactgaagagttgcataagtatcagaaaatgttagaaccaccaccctcagccaagcccttcaccattgatgtggacaagaagttagaagagggccagaagaatataaggctgttgcggacagagcttcagaaacttggtgagtctctccaatcagcagagagagcttgttgccacagcactggggcaggaaaacttcgtcaagccttgaccacttgtgatgacatcttaatcaaacaggaccagactctggctgaactgcagaacaacatggtgctagtgaaactggaccttcggaagaaggcagcatgtattgctgagcagtatcatactgtgttgaaactccaaggccaggtttctgccaaaaagcgccttggtaccaaccaggaaaatcagcaaccaaaccaacaaccaccagggaagaaaccattccttcgaaatttacttccccgaacaccaacctgccaaagctcaacagactgcagcccttatgcccggatcctacgctcacggcgttcccctttactcaaatctgggccttttggcaaaaagtactaaggctgtggggaaagagaagagcagtcatggccctgaggtgggtcagctactctcctgaagaaataggtctcttttatgctttaccatatatcaggaattatatccaggatgcaatactcagacactagcttttttctcacttttgtattataaccacctatgtaatctcatgttgttgtttttttttatttacttatatgatttctatgcacacaaaaacagttatattaaagatattattgttcacattttttattgaaaaaaaaaaaaaa

SEQ ID NO: 285 - DNA, 1440 bp, Homo sapiens
  misc_feature: Fc fragment of IgG, receptor, transporter, alpha
cgggcgcagaagcccctcctcggcgtcctggtcccggccgtgcccgcggtgtcccgggaggaaggggcgggccgggggtcgggaggagtcacgtgccccctcccgccccaggtcgtcctctcagcatgggggtcccgcggcctcagccctgggcgctggggctcctgctctttctccttcctgggagcctgggcgcagaaagccacctctccctcctgtaccaccttaccgcggtgtcctcgcctgccccggggactcctgccttctgggtgtccggctggctgggcccgcagcagtacctgagctacaatagcctgcggggcgaggcggagccctgtggagcttgggtctgggaaaaccaggtgtcctggtattgggagaaagagaccacagatctgaggatcaaggagaagctctttctggaagctttcaaagctttggggggaaaaggtccctacactctgcagggcctgctgggctgtgaactgggccctgacaacacctcggtgcccaccgccaagttcgccctgaacggcgaggagttcatgaatttcgacctcaagcagggcacctggggtggggactggcccgaggccctggctatcagtcagcggtggcagcagcaggacaaggcggccaacaaggagctcaccttcctgctattctcctgcccgcaccgcctgcgggagcacctggagaggggccgcggaaacctggagtggaaggagcccccctccatgcgcctgaaggcccgacccagcagccctggcttttccgtgcttacctgcagcgccttctccttctaccctccggagctgcaacttcggttcctgcggaatgggctggccgctggcaccggccagggtgacttcggccccaacagtgacggatccttccacgcctcgtcgtcactaacagtcaaaagtggcgatgagcaccactactgctgcattgtgcagcacgcggggctggcgcagcccctcagggtggagctggaatctccagccaagtcctccgtgctcgtggtgggaatcgtcatcggtgtcttgctactcacggcagcggctgtaggaggagctctgttgtggagaaggatgaggagtgggctgccagccccttggatctcccttcgtggagacgacaccggggtcctcctgcccaccccaggggaggcccaggatgctgatttgaaggatgtaaatgtgattccagccaccgcctgaccatccgccattccgactgctaaaagcgaatgtagtcaggcccctttcatgctgtgagacctcctggaacactggcatctctgagcctccagaaggggttctgggcctagttgtcctccctctggagccccgtcctgtggtctgcctcagtttcccctcctaatacatatggctgttttccacctcgataatataacacgagtttgggcccgaaaaa

SEQ ID NO: 286 - DNA, 3667 bp, Homo sapiens
  misc_feature: IGF-II mRNA-binding protein 2
tatatcatgtaagctagtcacacctatttgaattcacttttctttgtttcttgatttcttatggctattattgcaacaatcaaacaaattttgaataccttttgtgagctagcactgtggaaatatgagggaagtttattgtgttcttactttaaatagtttgcagttttattgtgtatacaaatgtatgcatgtgaaatatacagattttaaaaaagcagatcattaaagattaggtcataaggtgtagtctgtacatggaggaagagctaagttgattcagaataacatggttagatttcgaagctagcctggatttgaatcttggatccaccactgactagctatgtaagcttagtcaagcaactcaacggaggaggcgaggagcgccgggtaccgggccgggggagccgcgggctctcggggaagagacggatgatgaacaagctttacatcgggaacctgagccccgccgtcaccgccgacgacctccggcagctctttggggacaggaagctgcccctggcgggacaggtcctgctgaagtccggctacgccttcgtggactaccccgaccagaactgggccatccgcgccatcgagaccctctcgggtaaagtggaattgcatgggaaaatcatggaagttgattactcagtctctaaaaagctaaggagcaggaaaattcagattcgaaacatccctcctcacctgcagtgggaggtgttggatggacttttggctcaatatgggacagtggagaatgtggaacaagtcaacacagacacagaaaccgccgttgtcaacgtcacatatgcaacaagagaagaagcaaaaatagccatggagaagctaagcgggcatcagtttgagaactactccttcaagatttcctacatcccggatgaagaggtgagctccccttcgccccctcagcgagcccagcgtggggaccactcttcccgggagcaaggccacgcccctgggggcacttctcaggccagacagattgatttcccgctgcggatcctggtccccacccagtttgttggtgccatcatcggaaaggagggcttgaccataaagaacatcactaagcagacccagtcccgggtagatatccatagaaaagagaactctggagctgcagagaagcctgtcaccatccatgccaccccagaggggacttctgaagcatgccgcatgattcttgaaatcatgcagaaagaggcagatgagaccaaactagccgaagagattcctctgaaaatcttggcacacaatggcttggttggaagactgattggaaaagaaggcagaaatttgaagaaaattgaacatgaaacagggaccaagataacaatctcatctttgcaggatttgagcatatacaacccggaaagaaccatcactgtgaagggcacagttgaggcctgtgccagtgctgagatagagattatgaagaagctgcgtgaggcctttgaaaatgatatgctggctgttaacacccactccggatacttctccagcctgtacccccatcaccagtttggcccgttcccgcatcatcactcttatccagagcaggagattgtgaatctcttcatcccaacccaggctgtgggcgccatcatcgggaagaagggggcacacatcaaacagctggcgagattcgccggagcctctatcaagattgcccctgcggaaggcccagacgtcagcgaaaggatggtcatcatcaccgggccaccggaagcccagttcaaggcccagggacggatctttgggaaactgaaagaggaaaacttctttaaccccaaagaagaagtgaagctggaagcgcatatcagagtgccctcttccacagctggccgggtgattggcaaaggtggcaagaccgtgaacgaactgcagaacttaaccagtgcagaagtcatcgtgcctcgtgaccaaacgccagatgaaaatgaggaagtgatcgtcagaattatcgggcacttctttgctagccagactgcacagcgcaagatcagggaaattgtacaacaggtgaagcagcaggagcagaaataccctcagggagtcgcctcacagcgcagcaagtgaggctcccacaggcaccagcaaaacaacggatgaatgtagcccttccaacacctgacagaatgagaccaaacgcagccagccagatcgggagcaaaccaaagaccatctgaggaatgagaagtctgcggaggcggccagggactctgccgaggccctgagaaccccaggggccgaggaggggcggggaaggtcagccaggtttgccagaaccaccgagccccgcctcccgccccccagggcttctgcaggcttcagccatccacttcaccatccactcggatctctcctgaactcccacgacgctatcccttttagttgaactaacataggtgaacgtgttcaaagccaagcaaaatgcacaccctttttctgtggcaaatcgtctctgtacatgtgtgtacatattagaaagggaagatgttaagatatgtggcctgtgggttacacagggtgcctgcagcggtaatatattttagaaataatatatcaaataactcaactaactccaatttttaatcaattattaatttttttttctttttaaagagaaagcaggcttttctagactttaaagaataaagtctttgggaggtctcacggtgtagagaggagctttgaggccacccgcacaaaattcacccagagggaaatctcgtcggaaggacactcacggcagttctggatcacctgtgtatgtcaacagaagggataccgtctccttgaagaggaaactctgtcactcctcatgcctgtctagctcatacacccatttctctttgcttcacaggttttaaactggttttttgcatactgctatataattctctgtctctctctgtttatctctcccctccctcccctccccttcttctccatctccattcttttgaatttcctcatccctccatctcaatcccgtatctacgcaccccccccccccaggcaaagcagtgctctgagtatcacatcacacaaaaggaacaaaagcgaaacacacaaaccagcctcaacttacacttggttactcaaaagaacaagagtcaatggtacttgtcctagcgttttggaagaggaaaacaggaacccaccaaaccaaccaatcaaccaaacaaagaaaaaattccacaatgaaagaatgtattttgtctttttgcattttggtgtataagccatcaatattcagcaaaatgattcctttctttaaaaaaaaaaaatgtggaggaaagtagaaatttaccaaggttgttggcccagggcgttaaattcacagatttttttaacgagaaaaacacacagaagaagctacctcaggtgtttttacctcagcaccttgatcttgtgtttcccttagagattttgtaaagctgatagttggagcatttttttatttttttaataaaaatgagttggaaaaaaaataagatatcaactgccagcctggagaaggtgacagtccaagtgtgcaacagctgttctgaattgtcttccgctagccaagaacctatatggccttcttttggacaaaccttgaaaatgtttatttaaaaaaaaaaaaaaaaaa

SEQ ID NO: 287 - DNA, 1410 bp, Homo sapiens
  misc_feature: pleckstrin homology domain containing, family A (phosphoinositide binding specific) member 1
tttggtgcagtttagcatgttcctctgtgttctgcatctcctgtagtgtaatgttcaagctcagaaatgccttatgtggatcgtcagaatcgcatttgtggttttctagacattgaagaaaatgaaaacagtgggaaatttcttcgaaggtacttcatactggataccagagaagatagtttcgtgtggtacatggataatccacagaacctaccttctggatcatcacgtgttggagccattaagcttacctacatttcaaaggttagcgatgctactaagctaaggccaaaggcggagttctgttttgttatgaatgcaggaatgaggaagtacttcctacaagccaatgatcagcaggacctagtggaatgggtaaatgtgttaaacaaagctataaaaattacagtaccaaagcagtcagactcacagcctaattctgataacctaagtcgccatggtgaatgtgggaaaaagcaagtgtcttacagaactgatattgttggtggcgtacccatcattactcccactcagaaagaagaagtaaatgaatgtggtgaaagtattgacagaaataatctgaaacggtcacaaagccatcttccttactttactcctaaaccacctcaagatagtgcggttatcaaagctggatattgtgtaaaacaaggagcagtgatgaaaaactggaagagaagatattttcaattggatgaaaacacaataggctacttcaaatctgaactggaaaaggaacctcttcgcgtaataccacttaaagaggttcataaagtccaggaatgtaagcaaagcgacataatgatgagggacaacctctttgaaattgtaacaacgtctcgaactttctatgtgcaggctgatagccctgaagagatgcacagttggattaaagcagtctctggcgccattgtagcacagcggggtcccggcagatctgcgtcttctgagcatccccccggtccttcagaatccaaacacgctttccgtcctaccaacgcagccgccgccacctcacattccacagcctctcgcagcaactctttggtctcaacctttaccatggagaagcgaggattttacgagtctcttgccaaggtcaagccagggaacttcaaggtccagactgtctctccaagagaaccagcttccaaagtgactgaacaagctctgttaagacctcaaagtaaaaatggccctcaggaaaaagattgtgacctagtagacttggacgatgcgagccttccggtcagtgacgtgtgaggcagaagcgcacggagcctgcctgcctctgccgtcctcagttacctttcatgaggcttctagccaaagatgataaagggggaaatggtttttagtgcgtatattatactgcctcttaggtgtactctt

SEQ ID NO: 288 - DNA, 1548 bp, Homo sapiens
  misc_feature: PDZ binding kinase
  misc_feature (88)..(88): n is a, c, g, or t
  misc_feature (138)..(138): n is a, c, g, or t
  misc_feature (457)..(457): n is a, c, g, or t
gccgggcgtatgtgttggtgctagaggcagctgcagggtctcgctgggggccgctcgggaccaattttgaagaggtacttggccacgncttattttcacctccgaccttttccttccaggcggtgagactctggactnagagtggcttttcacaatggaagggatcagtaatttcaagacaccaagcaaattatcagaaaaaaagaaatctgtattatgttcaactccaactataaatatcccggcctctccgtttatgcagaagcttggctttggtactggggtaaatgtgtacctaatgaaaagatctccaagaggtttgtctcattctccttgggctgtaaaaaagattaatcctatatgtaatgatcattatcgaagtgtgtatcaaaagagactaatggatgaagctaagattttgaaaagccttcatcatccaaacattgttggttatcgngcttttactgaagccagtgatggcagtctgtgtcttgctatggaatatggaggtgaaaagtctctaaatgacttaatagaagaacgatataaagccagccaagatccttttccagcagccataattttaaaagttgctttgaatatggcaagagggttaaagtatctgcaccaagaaaagaaactgcttcatggagacataaagtcttcaaatgttgtaattaaaggcgattttgaaacaattaaaatctgtgatgtaggagtctctctaccactggatgaaaatatgactgtgactgaccctgaggcttgttacattggcacagagccatggaaacccaaagaagctgtggaggagaatggtgttattactgacaaggcagacatatttgcctttggccttactttgtgggaaatgatgactttatcgattccacacattaatctttcaaatgatgatgatgatgaagataaaacttttgatgaaagtgattttgatgatgaagcatactatgcagcgttgggaactaggccacctattaatatggaagaactggatgaatcataccagaaagtaattgaactcttctctgtatgcactaatgaagaccctaaagatcgtccttctgctgcacacattgttgaagctctggaaacagatgtctagtgatcatctcagctgaagtgtggcttgcgtaaataactgtttattccaaaatatttacatagttactatcagtagttattagactctaaaattggcatatttgaggaccatagtttcttgttaacatatggataactatttctaatatgaaatatgcttatattggctataagcacttggaattgtactgggttttctgtaaagttttagaaactagctacataagtactttgatactgctcatgctgacttaaaacactagcagtaaaacgctgtaaactgtaacattaaattgaatgaccattacttttattaatgatctttcttaaatattctatattttaatggatctactgacattagcactttgtacagtacaaaataaagtctacatttgtttaaaacactgaaaaaaaaaaaaaaaa

SEQ ID NO: 289 - DNA, 1924 bp, Homo sapiens; identical to SEQ ID NO: 33
  misc_feature: ubiquitin specific protease 18

SEQ ID NO: 290 - DNA, 4775 bp, Homo sapiens
  misc_feature: kinesin-like 7
cagtcgcgcgcggtgcagtcgggaggtggaggcaccggctgcattgttttcgggatcgaggggtgagggcgctatggcacccggctgcaaaactgagttacgcagcgtgacaaatggtcagtctaaccaaccaagtaatgaaggtgatgccatcaaagtttttgtgcgaattcgtcctcctgcagaaagatctgggtcagctgatggagagcagaacttatgcttatctgtgctgtcctccacgagtctccggctgcactccaaccctgagcccaagaccttcacgtttgatcatgttgcagatgtggataccactcaggaatctgtatttgcaactgtggctaaaagcattgtggagtcttgcatgagcggttataatggtaccatctttgcatatggacagactggctcagggaagacatttactatgatgggaccatctgaatctgataatttttctcataacctgagaggagtaatcccacgaagttttgaatatttgttttccttaattgatcgtgaaaaagaaaaggctggagctggaaagagtttcctttgtaagtgttcctttattgaaatctacaacgagcagatatatgatctactggactctgcatcggctggactgtacttaagggagcatatcaagaagggagtctttgttgttggtgcggtggagcaggtggtaacctcagctgctgaagcctatcaggtgctgtctggaggatggaggaatagacgtgtggcatcaacatcaatgaacagagaatcgtctaggtctcatgccgtctttacaattacaatagagtcaatggagaaaagtaatgagattgtgaatatacggacctccctactcaacctggtggatttagcaggatctgaaaggcaaaaagatacccatgcagaagggatgagattgaaggaagcaggtaacataaatcgatcattgagctgcctgggccaagtgattacagcacttgtcgacgtgggtaatggaaaacagagacatgtttgctacagagactccaaacttaccttcttactacgggattcccttggaggtaatgccaaaacagccataattgcaaatgttcatcctggatccaggtgttttggggaaaccctatcaacacttaactttgctcaaagagccaagctgattaaaaacaaggcagtagtaaatgaagacacccaaggaaatgtgagccagctccaagctgaagtgaagaggctcaaagaacaactggcggagcttgcttcaggacagacaccaccagaaagcttcctgaccagagacaaaaagaagactaactatatggagtatttccaggaagcaatgttattctttaagaaatctgaacaggaaaagaagtctctgatagaaaaagttacccaattagaagacctcaccctcaaaaaggaaaaatttattcaatctaataaaatgattgtgaaattccgagaggatcaaataatacgcttggaaaagctccacaaggaatcccggggaggttttctgcctgaggagcaggatcgtttgctctcagaattaaggaatgagattcaaactctgcgagaacaaatagagcaccaccccagagttgcaaagtatgctatggaaaatcattccctcagggaggagaatagaagactgagattattagagcctgtgaaaagagctcaagaaatggatgcccagaccattgcaaaactagaaaaagctttctctgaaataagtggcatggagaaaagtgacaaaaatcagcaaggattttcacctaaagctcagaaagagccatgtttgtttgcaaacactgagaagttaaaagcacaactcctgcaaattcagacagagctgaataattcaaagcaagaatatgaagaattcaaagaacttactaggaaaaggcagctagaattggaatcagagcttcagtctttgcaaaaagcgaaccttaatcttgaaaaccttttggaagcaacaaaagcctgcaagcggcaagaagtttctcagctgaataaaattcatgctgaaacacttaagattataactacaccaaccaaggcctaccaacttcattcccgaccagtaccaaaattaagccctgaaatgggaagctttggctctctatacactcagaattctagcatattagataatgatatattaaatgagccagttcctcctgagatgaatgaacaagcttttgaggccatttctgaagagcttagaacagtgcaggaacaaatgagtgctcttcaagccaaactggatgaagaagagcataaaaacctaaagcttcagcagcatgttgacaaactggaacatcattctacccaaatgcaggagcttttctcatcagaaagaattgattggaccaaacagcaggaagagcttctctcacagttgaatgtccttgaaaagcagcttcaagagactcaaactaaaaatgactttttgaaaagtgaggtacatgacctgcgagtagtccttcattctgctgacaaggagctttcttcagtgaaattggaatatagttcattcaaaacgaatcaggagaaagaattcaacaaactttctgaaagacacatgcatgtacagcttcaattagataatctcaggttagaaaacgaaaagctgcttgagagcaaagcctgcctacaggattcctatgacaacttacaagaaataatgaaatttgagattgaccaactttcaagaaacctccaaaacttcaaaaaagaaaatgaaactctgaaatctgatctgaataatttgatggagcttcttgaggcagaaaaagaacgcaataacaaattatcattacagtttgaagaagataaagaaaacagttctaaagaaatcttaaaagttcttgaggctgtacgtcaggagaaacagaaagagacggccaagtgtgagcagcagatggcaaaagtacagaaactagaagagagcttgcttgctactgaaaaagtgatcagttccctggaaaagtctagagattctgataagaaagttgtagctgacctcatgaaccagatccaggagctaagaacatcggtctgtgagaaaacagaaactatagacaccctgaaacaagaactgaaggacataaattgcaaatacaactctgctttggttgacagagaagagagcagagtgttgatcaagaagcaggaagtggatattctggatctgaaagaaacccttaggctgagaatactttctgaggacatagagagggatatgctctgtgaggacctggctcatgccactgagcagctgaacatgctcacagaggcctcaaaaaaacactcggggctgctgcagtctgcccaggaagaactgaccaagaaggaagccctgattcaggaacttcagcacaagctaaaccaaaagaaagaggaagtagaacagaagaagaatgaatataacttcaaaatgaggcaactagaacatgtgatggattctgctgctgaggatccccagagtcctaagacaccacctcactttcaaacacatttggcaaaactcctggaaacacaagaacaagagatagaagatggaagagcctctaagacttctttggaacaccttgtaacaaagctaaatgaagacagagaagtcaaaaatgctgaaatcctcagaatgaaggagcagttgcgtgaaatggaaaacctacgcctggaaagtcagcagttaatagagaaaaactggctcctgcaaggtcagctggatgatattaaaagacaaaaggaaaacagtgatcagaatcatccagataatcaacagctgaagaatgaacaagaagaaagtatcaaagaaagacttgcaaaaagtaaaatagttgaagaaatgctgaaaatgaaagcagacctagaagaagtccaaagtgccctttacaacaaagagatggaatgccttagaatgactgatgaagtcgaacgaacccaaactttggagtctaaagcattccaggaaaaagaacaactgagatcaaagctggaagaaatgtatgaagaaagagagagaacatcccaggagatggaaatgttaaggaagcaggtggagtgtcttgctgaggaaaatggaaagttggtaggtcaccaaaatttgcatcagaagattcagtacgtagtgcgactaaagaaggaaaatgtcaggcttgctgaggagacagaaaagttgcgtgccgaaaatgtatttttaaaagaaaagaaaagaagtgaatcttgaggattccggtcagctacctaggcatcaccttgtttgaagatgtttcttctcttttacaagtaagacctactcctggccacttaggagagctgaatttatggaccttaattattaaatgtttataaggtggtggtaaccacctcaagtttctgatgaacattctgcatccatatacaccctgtgacagtcagcagtctgctattaagtggcctacttcaaggctttgaatcaacttaagggaaaaccttttgtctttgtaaaaataaaagcctgtagctaaggtttacagtggacattagccagatcattttcttcttagattatgccataatctcctttgattcttatggaagttctaacaatatatggtggttccaacacctgcagtgagtttaatgactgacttagtagcaggtacaagaagcaaacttgttaatatagattatttttgtattcttactttaggtattttacttgagcattttccatgactgtaaataaagccattttttaagataaaaaaaaaaaaaaaaaa

SEQ ID NO: 291 - DNA, 1647 bp, Homo sapiens
  misc_feature: Kruppel-like factor 2 (lung)
gcccgcccgcgccccgaccagcccggcctcgggcagccactcaccggtgtccccgtccgcgtccttcctccccgggtcccggccatggcgctgagtgaacccatcctgccgtccttctccactttcgccagcccgtgccgcgagcgcggcctgcaggagcgctggccgcgcgccgaacccgagtccggcggcaccgacgacgacctcaacagcgtgctggacttcatcctgtccatggggctggatggcctgggcgccgaggccgccccggagccgccgccgccgcccccgccgcctgcgttctattaccccgaacccggcgcgcccccgccctacagcgcccccgcgggtggcctggtgtctgagctgctgcgacccgagctggatgcgccgctggggcccgcactgcacggccgctttctgctggcgccgcccggccgcctggtcaaggccgagccccctgaagcggacggcggcggcggctacggctgcgcccccgggctgacccgtggaccgcgcggcctcaagcgcgagggcgccccgggcccggcggcttcgtgcatgcgaggtcccgggggccgccccccgccgccgcccgacacaccgccgctcagccccgacggccccgcgcgcctgcccgcgcccggtccgcgcgcctccttcccgccgcctttcggtggccctggtttcggcgcgcccgggcccggcctgcattacgcgccgcctgcgcccccagccttcggtctcttcgacgacgcggccgccgccgcggcagccctgggcctggcgccccccgccgcccgcggtctcctcacgccgcctgcgtccccgctggagctgctggaggccaagccaaagcgcggccgccgctcttggccccgcaaacgcaccgccactcacacctgcagctacgcgggctgcggcaagacctacaccaagagttcgcatctgaaggcgcatctgcgcacgcacacaggtgagaagccctaccactgcaactgggacggctgcggctggaagtttgcgcgctcagacgagctcacgcgccactaccgaaagcacacgggccaccggccattccagtgccatctgtgcgatcgtgccttttcgcgctccgatcacctggcgctgcacatgaaacggcacatgtagccgggacgcccccgcccacctgcggcgggccgtggcgggtcccacgcgccgggcgcggccccctcccaaactgtgactggtatttattggacccagagaaccgggccgggcacagcgtggctacagagggtctccctcgatgacgacgacgacgacgccaccaccccagcccccgtctgtgactgaaggcccggtgggaaaagaccacgatcctccttgacgagttttgtttttcaaaatggtgcaataatttaagtggcatcttctctcccaccgggtctacactagaggatcgaggcttgtgatgccttgtgagaaataagggccttaatttgtactgtctgcggcattttttataatattgtatatagtgactgacaaatattgtattactgtacatagagagacaggtgggcatttttgggctacctggttcgtttttataagattttgctgggttggttttttttttaattaaaaagttttgcatctttt

SEQ ID NO: 292 - DNA, 3197 bp, Homo sapiens
  misc_feature: SLAM family member 8
ggaccacagctcctcccgtgcatccactcggcctgggaggttctggattttggctgtcgagggagtttgcctgcctctccagagaaagatggtcatgaggcccctgtggagtctgcttctctgggaagccctacttcccattacagttactggtgcccaagtgctgagcaaagtcgggggctcggtgctgctggtggcagcgcgtccccctggcttccaagtccgtgaggctatctggcgatctctctggccttcagaagagctcctggccacgtttttccgaggctccctggagactctgtaccattcccgcttcctgggccgagcccagctacacagcaacctcagcctggagctcgggccgctggagtctggagacagcggcaacttctccgtgttgatggtggacacaaggggccagccctggacccagaccctccagctcaaggtgtacgatgcagtgcccaggcccgtggtacaagtgttcattgctgtagaaagggatgctcagccctccaagacctgccaggttttcttgtcctgttgggcccccaacatcagcgaaataacctatagctggcgacgggagacaaccatggactttggtatggaaccacacagcctcttcacagacggacaggtgctgagcatttccctgggaccaggagacagagatgtggcctattcctgcattgtctccaaccctgtcagctgggacttggccacagtcacgccctgggatagctgtcatcatgaggcagcaccagggaaggcctcctacaaagatgtgctgctggtggtggtgcctgtctcgctgctcctgatgctggttactctcttctctgcctggcactggtgcccctgctcagggaaaaagaaaaaggatgtccatgctgacagagtgggtccagagacagagaacccccttgtgcaggatctgccataaaggacaatatgaactgatgcctggactatcagtaaccccactgcacaggcacacgatgctctgggacataactggtgcctggaaatcaccatggtcctcatatctcccatgggaatcctgtcctgcctcgaaggagcagcctgggcagccatcacaccacgaggacaggaagcaccagcacgtttcacacctcccccttccctctcccatcttctcatatcctggctcttctctgggcaagatgagccaagcagaacattccatccaggacactggaagttctccaggatccagatccatggggacattaatagtccaaggcattccctcccccaccactattcataaagtattaaccaactggcaccaaggaattgcctccagcctgagtcctaggctctaaaagatattacatatttgaactaatagaggaactctgagtcacccatgccagcatcagcttcagccccagaccctgcagtttgagatctgatgcttcctgagggccaaggcattgctgtaagaaaaggtctagaaataggtgaaagtgagaggtgggggacaggggtttctctttctggcctaaggactttcaggtaatcagagttcatgggccctcaaaggtaaattgcagttgtagacaccgaggatggttgacaacccatggttgagatgggcaccgttttgcaggaaacaccatattaatagacatcctcaccatctccatccgctctcacgcctcctgcaggatctgggagtgagggtggagagtctttcctcacgctccagcacagtggccaggaaaagaaatactgaatttgccccagccaacaggacgttcttgcacaacttcaagaaaagcagctcagctcaggatgagtcttcctgcctgaaactgagagagtgaagaaccataaaacgctatgcagaaggaacattatggagagaaagggtactgaggcactctagaatctgccacattcattttcaaatgcaaatgcagaagacttaccttagttcaaggggaggggacaaagaccccacagcccaacagcaggactgtagaggtcactctgactccatcaaactttttattgtggccatcttaggaaaatacattctgcccctgaatgattctgtctagaaaagctctggagtattgatcactactggaaaaacacttaaggagctaaacttaccttcggggattattagctgataaggttcacagtttctctcacccaggtgtaactggattttttctggggcctcaatccagtcttgataacagcgaggaaagaggtattgaagaaacaggggtgggtttgaagtactattttccccagggtggcttcaatctccccacctaggatgtcagccctgtccaaggaccttccctcttctcccccagttccctgggcaatcacttcaccttggacaaaggatcagcacagctggcctccagatccacatcaccactcttccactcgattgttcccagatcctccctgcctggcctgctcagaggttccctgttggtaacctggctttatcaaattctcatccctttcccacacccacttctctcctatcaccttcccccaagattacctgaacagggtccatggccactcaacctgtcagcttgcaccatccccacctgccacctacagtcaggccacatgcctggtcactgaatcatgcaaaactggcctcagtccctaaaaatgatgtggaaaggaaagcccaggatctgacaatgagccctggtggatttgtggggaaaaaatacacagcactccccacctttctttcgttcatctccagggccccacctcagatcaaagcagctctggatgagatgggacctgcagctctccctccacaaggtgactcttagcaacctcatttcgacagtggtttgtagcgtggtgcaccagggccttgttgaacagatccacactgctctaataaagttcccatccttaatgactcacttgtcaactagtggactaattaaccctccaccaaaaaaacacaaagtgcttctgtgagaccaattttgtgctaatgagcattgagactgatgctttgtaagtcacaccacaacaaatattgattgagggcgctgcatgtgctgggtacatttcttggcacttgggaatcagtagtcaagcgaaacccttgcctttgagagtttatggtctggataatataaataaacaagtaagcataaaaaaaaaaaaaaaaa

SEQ ID NO: 293 - DNA, 473 bp, Homo sapiens
  misc_feature: apolipoprotein A-II
aggcacagacaccaaggacagagacgctggctaggccgccctccccactgttaccaacatgaagctgctcgcagcaactgtgctactcctcaccatctgcagccttgaaggagctttggttcggagacaggcaaaggagccatgtgtggagagcctggtttctcagtacttccagaccgtgactgactatggcaaggacctgatggagaaggtcaagagcccagagcttcaggccgaggccaagtcttactttgaaaagtcaaaggagcagctgacacccctgatcaagaaggctggaacggaactggttaacttcttgagctatttcgtggaacttggaacacagcctgccacccagtgaagtgtccagaccattgtcttccaaccccagctggcctctagaacacccactggccagtcctagagctcctgtccctacccactctttgctacaataaatgctgaatgaatcc

SEQ ID NO: 294 - DNA, 3021 bp, Homo sapiens
  misc_feature: RAD54 homolog B (S. cerevisiae)
ggggatagctggttaccagaaggacttctttgcagggccagtggtttctgtcagattttcgccggtcacgactgctgaatatgagacgatctgcagcaccaagtcagttgcaggggaattccttcaaaaaaccaaaatttatacctccaggaagaagtaatccaggtctgaatgaagagattacaaaactgaatccagatataaaattatttgagggtgttgcaattaataacacctttctcccgtcacaaaatgatcttagaatatgcagtttaaatctgcctagtgaagaaagtactagagaaatcaataacagagataattgcagtggaaaatattgttttgaagcacctacactggcaacattagatccacctcatacagttcattcggctcctaaagaagtagcagtgtccaaggaacaagaagagaaatctgatagcctagttaaatatttcagtgttgtttggtgtaagccttcaaagaaaaaacataaaaagtgggaaggtgatgctgttcttattgtaaaaggaaagtcatttatattaaagaatttggaaggcaaagacattggaagaggcattggttataaattcaaagagcttgaaaagattgaagagggccaaacactgatgatttgtggaaaagaaatagaagtcatgggtgtaatctctccagatgacttcagcagtggcaggtgttttcagcttggaggaggaagtactgctatctcgcattcttctcaggttgccaggaaatgtttctctaaccctttcaaaagtgtttgtaaaccaagttcaaaggaaaatagacagaatgatttccaaaattgcaaaccacgccatgacccatatacgccaaattccctcgttatgccacgaccagataagaatcaccagtgggtattcaataagaactgtttccctcttgtggatgtagtgattgatccttaccttgtatatcatcttcgaccacatcagaaagaaggaatcatattcctttatgaatgtgtaatgggaatgagaatgaatggcagatgtggagctattcttgctgatgaaatgggtttagggaagacattgcaatgtatttcgctcatctggaccctgcagtgtcagggaccctatggaggcaagccagtaataaagaagacactaattgtcacacctggaagcttggtgaataattggaagaaagaatttcaaaaatggctaggaagtgaaaggatcaagatatttactgttgatcaggaccacaaagttgaagaattcatcaagtctatattttattctgttcttattatcagttatgaaatgttacttcgttccctggatcaaattaagaatataaaatttgatcttctaatctgtgacgaggggcatcgtttgaagaacagtgccattaagacaactacagccctcattagcctttcttgtgagaaaagaataattctaactggtactccaattcagaatgatctgcaagaattttttgcattaattgattttgtaaatccaggaatattaggctctttgtcatcttataggaaaatatatgaagaacccatcattttatcgagagaaccttctgcttctgaggaagaaaaggagttaggagaaagaagagcagctgaacttacttgcctcactggactctttatccttagaagaacccaagaaattataaataaatatctcccacctaaaatagagaatgttgtcttttgccgaccaggagcactacagattgagctttatcgaaagctgttaaattctcaggttgtcaggttctgccttcaagggttgttggaaaatagtccccatctaatatgtataggagctcttaaaaaactgtgcaatcacccctgccttttgttcaactctataaaggaaaaggaatgtagctcaacttgtgataaaaatgaagaaaagagtctatacaaaggcttgctaagtgtgtttcctgctgactacaaccctctcctgtttactgaaaaggagtcaggaaaactacaggtgttgtccaagctcttagcggttatccacgaacttcgacctactgaaaaggtggtgttggtatccaactatacacaaaccttgaacattttacaagaagtatgtaagcgtcatggatatgcttatacaagacttgatggacaaacaccaatctctcaaaggcagcagattgttgatggctttaacagtcaacactcttctttttttatttttttgttaagttcaaaagctggtggtgtaggacttaacctcattggaggatctcacttaattctctatgacattgattggaatccagccactgacattcaggcaatgtctagagtatggagagatggtcagaaatatcctgtacatatttacagactcctaactacaggtacaatagaagaaaagatctatcaaaggcagatcagtaagcaaggtctttgtggggcagttgtcgacctcaccaagacatctgaacatattcagttttcagtagaagaacttaaaaatttgttcacattacatgaaagttcagattgtgttactcatgatctgcttgactgtgagtgtacaggagaagaagttcatacaggtgattcgttggaaaaattcattgtctctagagattgtcagcttggtccacatcaccagaaatctaactccctgaaacctctttctatgtcccagctgaagcaatggaaacatttttctggagatcatttaaatcttacagatccttttcttgaaagaataacagaaaatgtgtcattcatttttcagaatataaccactcaagctactggcacatagtgaaagattacttctgacattccattgctcttcttttgaaaattagtatggtaattaaatgtactttttgaaaattaatagaattatttaaattacagtatatgttgcaaaatatatcacttttgatacaatagtcaaaattgagtggtttaatgttttgtaaatattaagtgtttaaatgaaaaataaagatgtgcttatatcattg

SEQ ID NO: 295 - DNA, 3941 bp, Homo sapiens
  misc_feature: cat eye syndrome chromosome region, candidate 1
  misc_feature (3939)..(3939): n is a, c, g, or t
ttgggaaacccctacctgtctgtacctgtaggtcttttctctggggtctggaagaagaatccttcaatatcttgccttctggtaatctgagagcagggcgagaaaaggaagatcagagttccacccttaaatctgtaggttttcactcccccactctcctttgcagtcccgtggagtctccatctgagccctttcctagtccaggcatcccgatgttggtggatggcccatctgagcggccagccctgtgcttcttgctgttggctgtggcaatgtctttcttcggctcagctctatccatagatgaaacacgggcgcatctgttgttgaaagaaaagatgatgcggctcggggggcggctggtgctgaacaccaaggaggagctggccaatgagaggctcatgacgctcaaaatcgctgagatgaaggaggccatgaggaccctgatattcccacccagcatgcactttttccaggccaagcatctcattgagagaagtcaagtgtttaatattctaaggatgatgccaaaaggggctgccttgcacctccatgacattggcatcgtgactatggactggctggtgaggaatgtcacctacaggcctcactgccacatctgtttcaccccaagggggatcatgcagttcagatttgctcacccaactccccgtccatcagaaaaatgttccaagtggattctgctggaggattatcggaagcgggtgcagaacgtcactgagtttgatgacagcttgctgaggaatttcactctggtgacccagcacccggaggtgatttacacaaaccaaaatgttgtctggtcgaaatttgaaaccatcttcttcaccatctctggtctcatccattacgcaccagtgttcagagactatgtcttccggagcatgcaggagttctacgaggacaacgtgctctacatggagatcagagccaggctgctgccggtgtatgagctcagtggagagcaccatgacgaagagtggtcagtgaagacttaccaggaagtagctcagaagtttgtggaaactcaccctgagtttattggaatcaaaatcatttattcggatcacagatccaaagatgtggctgtcatcgcagaatccatccgaatggccatggggctccgaatcaagttccccacggtggtggcagggtttgacctggtggggcatgaggacactggccactccttgcgtgactacaaggaagctctgatgatccccgccaaggatggcgttaagctgccttacttcttccacgccggagaaacagactggcagggtacttccatagacaggaacattctggatgctctgatgctgaacactaccagaatcggccatggatttgctttgagcaaacaccccgcagtcaggacttactcctggaaaaaggacatccccatagaagtctgtcccatctctaaccaggtgctgaaactggtgtctgacttgaggaaccaccctgtagccactctgatggccactgggcaccccatggtgatcagctctgatgacccagctatgtttggtgccaaaggcttgtcctatgatttctatgaggtcttcatgggcattggggggatgaaggctgacctgaggaccctcaaacagctggccatgaactctatcaagtacagtaccctgttggagagtgagaaaaatactttcatggaaatctggaagaagagatgggataagttcatagcagatgtggctacaaagtgaggagaagctagccagccctctacaagctgtcttcttgcacacgctgtcacttcctctcactcgttcttgaatcagctccatgtgcccatgaaatcaatggcctctgtatggagcgaccctgtgagaagcacttggctggctgagcaaattcatcctctggaaatattctctctcagccacagtgacattgaccctcttggttttctcctctctctggccatttcttccagtttccctatttcagagtcttctcctctctctgatctctgtgctgtttcctcaggactcagtcctgggctctcttctattctggtctctttatttttttatttttgtattttttcgagatggagttttgctcttgttgcccaggctggagtacaatggtgcgatctcagctcagtgcaacctccgccacccgggttcaggcaattctcttgcatcagcctcccgagtagttggaattataggcatgtgccaccacacccagctgatttttgcatttttagtagagacaggttttcaccatgttggcgagctggtatccaactcttgacctcaggtgatccactcgccccttggctcccaaagtgctggaattacaggcgttagccaccatgcctggcctattctggtctctttaactctctcctctttatttctcttctctctctgtacacttttcctgggtggtctcatccattcctttgctttttcataccatttatttgttaatgattcccacatttatttatgcacttggagagctcacaggaatctcagaaactgatgaggtacaattctgaaccctcagtctcttccctttaaacctttctttttctctactttaatttttctaaagagtgtcttgctatgttgcccaggctggtctccaactcaagtgatcctcctgccgcagtctcccgaagtgctgggattactgacatgagccaccacactcagccctttaaacctttccctggcctttcccatagctggtgaaggacacctccatccattccacgcagttgctcaaagcagaaattttcagtgcaagtcttgatgctgcgccgtcccccactccctacatcagaacgcatccctcatctggactccagcggtggcttcttgatgctgcgcggtcccccactccctacatcagaatgcatcccgcatccagactccagcggtggtgctctacctgcacgctgttgccaagtccaagctaccatactcctgcctgagctatgacaacagcctcctcactgatctcccctttcttccctttgcctcctccagctcatttttcacagtgtagaatgacattttgtttgtttgttttgttttgtttgagatggagtctcgttctgttgcccagggtggagtgcagcggtgcgatctcggctcactgcaacttccactcccgggttcaagcggattctcgtgcctcagcctcctgagtagctgggattacaggcatgcaccaccatgcccggataatttttgtatttttagtagagatggggtttcactatgttggccaggctggtctcgaacacctgacttcgtggtccacccgccttcggcctcccaaagcactgggattacaggcgtgagccacccggcctggcctagaatgacttttaaaagatcaaattaaatcaggtcactcctttgcttacaacgcagtgcgtttagaggtacaccccatgtctccacagggcatacagcatccgatttaatctggatccattccggcgcttcctctcccagtcacccagagggccccaaccccggcggccctttcttcctcaaatgtcctcggctctataccgtgcctgggtcttttctctttctctctgcctggaacattccttctttccccttttgtcttgcccactcctgtttacccttcaagtttcaagttcatgtcactgtctcagagaggttttcctgtgctcgccctgtttctctcaggaagccttgctcttttccatcatgcctctaatcacagcttataatcggatatttatttctgtgtctacagtcttgccctgccagactgtaagccccatgtgggcaggcgctcatgattgtttctgattgtttcacgcatgctgctaacccagagcctgggcccaaagctagttagtactcaataaacaatgcattgaaaaaaaaaaaaaaaaanta

SEQ ID NO: 296 - DNA, 916 bp, Homo sapiens
  misc_feature: membrane-spanning 4-domains, subfamily A, member 4
gcaggcctgaagaaagcaccttttctgctgccatgacaaccatgcaaggaattgaacaggccatgcaaggggctggccatggatgtgccccagctgggaaacatggctgtcatacattcacatctgtggaaaggattgcaagagaagttcttgaagggagaacccaaagtccttggggttgtgcagattctgactgccctgatgagccttagcatgggaataacaatgatgtgtatggcatctaatacttatggaagtaaccctatttccgtgtatatcgggtacacaatttgggggtcagtaatgtttattatttcaggatccttgtcaattgcagcaggaattagaactacaaaaggcctggtccgaggtagtctaggaatgaatatcaccagctctgtactggctgcatcagggatcttaatcaacacatttagcttggcgttttattcattccatcacccttactgtaactactatggcaactcaaataattgtcatgggactatgtccatcttaatgggtctggatggcatggtgctcctcttaagtgtgctggaattctgcattgctgtgtccctctctgcctttggatgtaaagtgctctgttgtacccctggtggggttgtgttaattctgccatcacattctcacatggcagaaacagcatctcccacaccacttaatgaggtttgaggccacccaaagatcaacagacaaatgctccagaaatctatgctgactgtgacacaagagcctcacatgagaaattaccagtatccaacttcgatactgatagacttgttgatattattattatatgtaatcccattatgaactgtgtgtgtatagagagataataaattcaaaattatgttctcatttttttccctggaactcaataactcatttcaaa

SEQ ID NO: 297 - DNA, 2791 bp, Homo sapiens
  misc_feature: activation-induced cytidine deaminase
gaaccatcattaattgaagtgagatttttctggcctgagacttgcagggaggcaagaagacactctggacaccactatggacagcctcttgatgaaccggaggaagtttctttaccaattcaaaaatgtccgctgggctaagggtcggcgtgagacctacctgtgctacgtagtgaagaggcgtgacagtgctacatccttttcactggactttggttatcttcgcaataagaacggctgccacgtggaattgctcttcctccgctacatctcggactgggacctagaccctggccgctgctaccgcgtcacctggttcacctcctggagcccctgctacgactgtgcccgacatgtggccgactttctgcgagggaaccccaacctcagtctgaggatcttcaccgcgcgcctctacttctgtgaggaccgcaaggctgagcccgaggggctgcggcggctgcaccgcgccggggtgcaaatagccatcatgaccttcaaagattatttttactgctggaatacttttgtagaaaaccatgaaagaactttcaaagcctgggaagggctgcatgaaaattcagttcgtctctccagacagcttcggcgcatccttttgcccctgtatgaggttgatgacttacgagacgcatttcgtactttgggactttgatagcaacttccaggaatgtcacacacgatgaaatatctctgctgaagacagtggataaaaaacagtccttcaagtcttctctgtttttattcttcaactctcactttcttagagtttacagaaaaaatatttatatacgactctttaaaaagatctatgtcttgaaaatagagaaggaacacaggtctggccagggacgtgctgcaattggtgcagttttgaatgcaacattgtcccctactgggaataacagaactgcaggacctgggagcatcctaaagtgtcaacgtttttctatgacttttaggtaggatgagagcagaaggtagatcctaaaaagcatggtgagaggatcaaatgtttttatatcaacatcctttattatttgattcatttgagttaacagtggtgttagtgatagatttttctattcttttcccttgacgtttactttcaagtaacacaaactcttccatcaggccatgatctataggacctcctaatgagagtatctgggtgattgtgaccccaaaccatctctccaaagcattaatatccaatcatgcgctgtatgttttaatcagcagaagcatgtttttatgtttgtacaaaagaagattgttatgggtggggatggaggtatagaccatgcatggtcaccttcaagctactttaataaaggatcttaaaatgggcaggaggactgtgaacaagacaccctaataatgggttgatgtctgaagtagcaaatcttctggaaacgcaaactcttttaaggaagtccctaatttagaaacacccacaaacttcacatatcataattagcaaacaattggaaggaagttgcttgaatgttggggagaggaaaatctattggctctcgtgggtctcttcatctcagaaatgccaatcaggtcaaggtttgctacattttgtatgtgtgtgatgcttctcccaaaggtatattaactatataagagagttgtgacaaaacagaatgataaagctgcgaaccgtggcacacgctcatagttctagctgcttgggaggttgaggagggaggatggcttgaacacaggtgttcaaggccagcctgggcaacataacaagatcctgtctctcaaaaaaaaaaaaaaaaaaaagaaagagagagggccgggcgtggtggctcacgcctgtaatcccagcactttgggaggccgagccgggcggatcacctgtggtcaggagtttgagaccagcctggccaacatggcaaaaccccgtctgtactcaaaatgcaaaaattagccaggcgtggtagcaggcacctgtaatcccagctacttgggaggctgaggcaggagaatcgcttgaacccaggaggtggaggttgcagtaagctgagatcgtgccgttgcactccagcctgggcgacaagagcaagactctgtctcagaaaaaaaaaaaaaaaagagagagagagagaaagagaacaatatttgggagagaaggatggggaagcattgcaaggaaattgtgctttatccaacaaaatgtaaggagccaataagggatccctatttgtctcttttggtgtctatttgtccctaacaactgtctttgacagtgagaaaaatattcagaataaccatatccctgtgccgttattacctagcaacccttgcaatgaagatgagcagatccacaggaaaacttgaatgcacaactgtcttattttaatcttattgtacataagtttgtaaaagagttaaaaattgttacttcatgtattcatttatattttatattattttgcgtctaatgattttttattaacatgatttccttttctgatatattgaaatggagtctcaaagcttcataaatttataactttagaaatgattctaataacaacgtatgtaattgtaacattgcagtaatggtgctacgaagccatttctcttgatttttagtaaacttttatgacagcaaatttgcttctggctcactttcaatcagttaaataaatgataaataattttggaagctgtgaagataaaataccaaataaaataatataaaagtgatttatatgaagttaaaataaaaaatcagtatgatggaataaacttg

SEQ ID NO: 298 - DNA, 3510 bp, Homo sapiens
  misc_feature: C-type lectin domain family 5, member A
caggaagaggtatttcttggggatgctaccaaggcagagactgtgaagaaggaagaacgttgcttgggcaaaaggagcatattctcaggagacggggcccctgcctgccacaccaagcattaggccaccaggaagacccccatctgcaagcaagcctagccttccagggagaaagaggcccctgcagctccttcatcatgaactggcacatgatcatctctgggcttattgtggtagtgcttaaagttgttggaatgaccttatttctactttatttcccacagatttttaacaaaagtaacgatggtttcaccaccaccaggagctatggaacagtctcacagatttttgggagcagttccccaagtcccaacggcttcattaccacaaggagctatggaacagtctgccccaaagactgggaattttatcaagcaagatgttttttcttatccacttctgaatcatcttggaatgaaagcagggacttttgcaaaggaaaaggatccacattggcaattgtcaacacgccagagaaactgaagtttcttcaggacataactgatgctgagaagtattttattggcttaatttaccatcgtgaagagaaaaggtggcgttggatcaacaactctgtgttcaatggcaatgttaccaatcagaatcagaatttcaactgtgcgaccattggcctaacaaagacatttgatgctgcatcatgtgacatcagctaccgcaggatctgtgagaagaatgccaaatgatcacagttccctgtgacaagaactatacttgcaactctttttgaatccatacaggtcgtctggccaatgattcttttacttacctatctgtctaccagtagcggtccttgcccatttgggaaactgagcttctttcttctgcactgggggactggatgctagccatctccaggagacaggatcagttttacggaaacaactcagttagtatagagatgaggtccgcttctgtagtactgagcatttctgactgatcaaaaaggcctagtctgttgacagggtttgttttattttagcctcagagtataccatactactagggagtaactgtagagtgagaaattataaacattatttagggattaccatggtggaagagggataaacataggtcctgtgacttcgtctctgttctcaagggaaccccattcacatgcccctcctaactccacaagcgagggtagcagaggctctcctcagtctgaactaaggcttggccttggggagggctcctagtgctgagcttggagcagcacggacagcagcattgtttatgggaatggagagaggtctgggcaggataggaaccttcttggagacccctttgaagaaaaccaggcagccaagggagccaaacacactagatttctgttcttcagcaaagccctgaagagacacttaagctaaaaattcccttgtcatatttctgaaactccattataacatatgtaactcctttgtaaccaaaatttaggtaagcaggcttcctttgctctgaaggttttgagtacctggctgtatttgttgagtatttttaaaattttggatagtctcttaggcaacaataatcacaatatattcatcccttcagttctggagaaagcctgataccagcacagcctactgaccccaaggagcctggcactgattggcatcacattgatctaagaactggtccagccgacgaagagtaggaaaagagaagggctgctcagggaaacattggctgggggcacggaataagcacatagtaaaaagggaacatcagggtcaaatggaaatcacctgagacaggaaacagggagttcatttggccacactggaagaaaggcaagaaagaggaagacaagtcttggggtaccctggctgttctccacactcacaagacatcagctatatactctgcttggtgcataagagagagaaaagagatgccttttgtgttttgagtaagaataattaaaccataaggaagaccatgtataaaactgatggaaataatagtcaccaaagtacagcacataccattttgtgtctaataacaatgtagcacagtaatgactgtacatgtcattgtatgtataccaaacaagattgttgtaaatcatattttttattacaacactaagttctgcttctgcattcctaggtttcatcatttttggctccttagcatggccacttacaattttttaacatgagataacacatcaggtgtcagaacttgcttgaagggaattaccagaagtaatttgtgtttgagatggggtggaaattggaattatattagtagccggtggagatacaagttctctgactgtgttgggaaaggataagtgctaccgttgagaagggaagaaaggctgagtctaggtggagaaaaatatcaacagaactctagccaaaggcaagccccagaactcagacaacagaaaggaaatcctaatccttctgttttgagaagagagaactgtagttgcttcacttcctatttcatgacagaataactgcaaacttttaagatcaggaaatgtagacatctagtgatttctttagtagacagtttaatttcccccaagattaggagacacttctgtgcaggttctaaaaggagcccaatggcctggggtgggagtggggagtagatagggaatatgtgggatttggtttaagttcatcattgggagagttcctggatccttgcaagcttagataaatgtgatctttattagatagcagtggcatgcttttaaaaaaaaaaaggcaatgaaaatttagcaagccactgaatttgagttttcactttgtttctaatatgctgtgtgaatcagtacagttttcttaccctttcttggtcttaatttccttactgataaaatggggtagtaatacctatctcaaaaaatattgcacatattaaataacattcctctatgtatctcaatggcattagacattaggagaagcattttgtggaggatttgaagttgagatcttcatccaagaagtagcttttcaatttgctagaagcttaatgtaggcaagccacttcatttttcagaacttgtttactcatttataatatgggaataaaaatttgtgcaagtcagagaagggtgccttaaaaatgttgtggccaagccacatgagatcaaagacacacttttcatgacctcaaatgtgggcccagcctaggtcagccaacccccatccaacccttagactcacgaacaaatccacctgagatcagcagagccaccctagatcagctgaaactctaagcacaaaaataaaaacttatcactgtataccactggagttttctggttatctctcgtatagcaaaatctaactgatgcaatctccatctggccttcatccttctccctttattgtcctttcgtgtattgttcatccagcaaccaggatgatcttgttaaaacattaaacagattctgtcactctt

SEQ ID NO: 299 - DNA, 1271 bp, Homo sapiens
  misc_feature: C-type lectin domain family 4, member A
ttctcactatactggtcctgaggaaagggcttctgtgaactgcggtttttagtttttattgtggttcttagttctcatgagacccctcttgaggatatgtgcctatctggtgcctctgctctccactagttgagtgaaaggaaggaggtaatttaccaccatgtttggttcctgtttataagatgttttaagaaagatttgaaacagattttctgaagaaagcagaagctctcttcccattatgacttcggaaatcacttatgctgaagtgaggttcaaaaatgaattcaagtcctcaggcatcaacacagcctcttctgcagcttccaaggagaggactgcccctcacaaaagtaataccggattccccaagctgctttgtgcctcactgttgatatttttcctgctattggcaatctcattctttattgcttttgtcattttctttcaaaaatattctcagcttcttgaaaaaaagactacaaaagagctggttcatacaacattggagtgtgtgaaaaaaaatatgcccgtggaagagacagcctggagctgttgcccaaagaattggaagtcatttagttccaactgctactttatttctactgaatcagcatcttggcaagacagtgagaaggactgtgctagaatggaggctcacctgctggtgataaacactcaagaagagcaggatttcatcttccagaatctgcaagaagaatctgcttattttgtggggctctcagatccagaaggtcagcgacattggcaatgggttgatcagacaccatacaatgaaagttccacattctggcatccacgtgagcccagtgatcccaatgagcgctgcgttgtgctaaattttcgtaaatcacccaaaagatggggctggaatgatgttaattgtcttggtcctcaaaggtcagtttgtgagatgatgaagatccacttatgaactgaacattctccatgaacaggtggttggattggtatctgtcattgtagggatagataataagctcttcttattcatgtgtaagggaggtccatagaatttaggtggtctgtcaactattctacttatgagagaattggtctatacattgactgattcactttttcataaagtgagcatttattgagcattttttcatgtgccagagcctgtactggaggcccccattgtgcacacagggagagaacatgagtctctcttaatttttatctggttgctaaagaattatttaccattaaattatatggtgtggtgt

SEQ ID NO: 300 - DNA, 2051 bp, Homo sapiens
  misc_feature: mucolipin 1
agatcagctgatgccggagggtttgaagccgcgccgcgagggagcgaggtcgcagtgacagcggcgggcgatcggacccaggctgccccgccgtacccgcctgcgtcccgcgctcccgccccagcatgacagccccggcgggtccgcgcggctcagagaccgagcggcttctgacccccaaccccgggtatgggacccaggcggggccttcaccggcccctccgacacccccagaagaggaagaccttcgccgtcgtctcaaatactttttcatgagtccctgcgacaagtttcgagccaagggccgcaagccctgcaagctgatgctgcaagtggtcaagatcctggtggtcacggtgcagctcatcctgtttgggctcagtaatcagctggctgtgacattccgggaagagaacaccatcgccttccgacacctcttcctgctgggctactcggacggagcggatgacaccttcgcagcctacacgcgggagcagctgtaccaggccatcttccatgctgtggaccagtacctggcgttgcctgacgtgtcactgggccggtatgcgtatgtccgtggtgggggtgacccttggaccaatggctcagggcttgctctctgccagcggtactaccaccgaggccacgtggacccggccaacgacacatttgacattgatccgatggtggttactgactgcatccaggtggatccccccgagcggccccctccgccccccagcgacgatctcaccctcttggaaagcagctccagttacaagaacctcacgctcaaattccacaagctggtcaatgtcaccatccacttccggctgaagaccattaacctccagagcctcatcaataatgagatcccggactgctataccttcagcgtcctgatcacgtttgacaacaaagcacacagtgggcggatccccatcagcctggagacccaggcccacatccaggagtgtaagcaccccagtgtcttccagcacggagacaacagcttccggctcctgtttgacgtggtggtcatcctcacctgctccctgtccttcctcctctgcgcccgctcactccttcgaggcttcctgctgcagaacgagtttgtggggttcatgtggcggcagcggggacgggtcatcagcctgtgggagcggctggaatttgtcaatggctggtacatcctgctcgtcaccagcgatgtgctcaccatctcgggcaccatcatgaagatcggcatcgaggccaagaacttggcgagctacgacgtctgcagcatcctcctgggcacctcgacgctgctggtgtgggtgggcgtgatccgctacctgaccttcttccacaactacaatatcctcatcgccacactgcgggtggccctgcccagcgtcatgcgcttctgctgctgcgtggctgtcatctacctgggctactgcttctgtggctggatcgtgctggggccctatcatgtgaagttccgctcactctccatggtgtctgagtgcctgttctcgctcatcaatggggacgacatgtttgtgacgttcgccgccatgcaggcgcagcagggccgcagcagcctggtgtggctcttctcccagctctacctttactccttcatcagcctcttcatctacatggtgctcagcctcttcatcgcgctcatcaccggcgcctacgacaccatcaagcatcccggcggcgcaggcgcagaggagagcgagctgcaggcctacatcgcacagtgccaggacagccccacctccggcaagttccgccgcgggagcggctcggcctgcagccttctctgctgctgcggaagggacccctcggaggagcattcgctgctggtgaattgattcgacctgactgccgttggaccgtaggccctggactgcagagacccccgcccccgaccccgcttatttatttgtagggtttgcttttaaggatcggctccctgtcgcgcccgaggagggcctggacctttcgtgtcggacccttgggggcggggagactgggtggggagggtgttgaataaa

SEQ ID NO: 301 - DNA, 2328 bp, Homo sapiens
  misc_feature: complement component 5 receptor 1 (C5a ligand)
agggggagcccaggagaccagaacatgaactccttcaattataccacccctgattatgggcactatgatgacaaggataccctggacctcaacacccctgtggataaaacttctaacacgctgcgtgttccagacatcctggccttggtcatctttgcagtcgtcttcctggtgggagtgctgggcaatgccctggtggtctgggtgacggcattcgaggccaagcggaccatcaatgccatctggttcctcaacttggcggtagccgacttcctctcctgcctggcgctgcccatcttgttcacgtccattgtacagcatcaccactggccctttggcggggccgcctgcagcatcctgccctccctcatcctgctcaacatgtacgccagcatcctgctcctggccaccatcagcgccgaccgctttctgctggtgtttaaacccatctggtgccagaacttccgaggggccggcttggcctggatcgcctgtgccgtggcttggggtttagccctgctgctgaccataccctccttcctgtaccgggtggtccgggaggagtactttccaccaaaggtgttgtgtggcgtggactacagccacgacaaacggcgggagcgagccgtggccatcgtccggctggtcctgggcttcctgtggcctctactcacgctcacgatttgttacactttcatcctgctccggacgtggagccgcagggccacgcggtccaccaagacactcaaggtggtggtggcagtggtggccagtttctttatcttctggttgccctaccaggtgacggggataatgatgtccttcctggagccatcgtcacccaccttcctgctgctgaataagctggactccctgtgtgtctcctttgcctacatcaactgctgcatcaaccccatcatctacgtggtggccggccagggcttccagggccgactgcggaaatccctccccagcctcctccggaacgtgttgactgaagagtccgtggttagggagagcaagtcattcacgcgctccacagtggacactatggcccagaagacccaggcagtgtaggcgacagcctcatgggccactgtggcccgatgtccccttccttcccggccattctccctcttgttttcacttcacttttcgtgggatggtgttaccttagctaactaactctcctccatgttgcctgtctttcccagacttgtccctccttttccagcgggactcttctcatccttcctcatttgcaaggtgaacacttccttctagggagcaccctcccaccccccacccccccccacacaccatctttccatcccaggcttttgaaaaacaaacagaaacccgtgtatctgggatatttccatatggcaataggtgtgaacagggaactcagaatacagacaagtagaaagattctcgcttaaaaaaatgtatttattttatggcaagttggaaaatatgtaactggaatctcaaaagttctttgggacaaaacagaagtccatggagttatctaagctcttgtaagtgagttaatttaaaaaagaaaattaggctgagagcagtggctcacgcctgtaatcccagaactttgggaggctaaggtgggtggatcacctgaggtcaagagttccagaccaggctggccagcatggtgaaaccccgtctgtactaaaaatacaaaaaattaactgggcatggtagtgggtgcctgtaatcccagctacttgggaggctgaggtgggagaattgctcgaaccttggaggtggaggttgtggtgagccatgatcgcaccactgcactctagcctgggtgaccgagggaggctctgtctcaaaagcaaagcaaaaacaaaaacaaaaacacctaaaaaacctgcagttttgtttgtactttgtttttaaattatgctttctattttgagatcattgcaaactcaacacaattgtaagtaatgatacagagggatcttgtgtacccttcacccagcctcccccaatggcaacatcttgcaaaactacaatgtagtctcataaccaggatattgacattgatacagtgaagatacaggacattctcatcaccacagggatccccaggatgcccacttccctccacccccacaccccagccgtgtccctaacccctggcaaccaggaatccactctccatttctataatgttgtcatttcaagaatgttattcaatggaatcatatagtatgtaacctgttttgagcttaaaaaaaaaagtatacatgactttaatgaggaaaataaaaatgaatattgaaaaaaaaaactttagag

SEQ ID NO: 302 - DNA, 1242 bp, Homo sapiens
  misc_feature: killer cell lectin-like receptor subfamily F, member 1
atttcatgttatacttaataaaacaaaacatacctgtatacacacacattcactcacattgaagatgcaagatgaagaaagatacatgacattgaatgtacagtcaaagaaaaggagttctgcccaaacatctcaacttacatttaaagattattcagtgacgttgcactggtataaaatcttactgggaatatctggaaccgtgaatggtattctcactttgactttgatctccttgatcctgttggtttctcagggagtattgctaaaatgccaaaaaggaagttgttcaaatgccactcagtatgaggacactggagatctaaaagtgaataatggcacaagaagaaatataagtaataaggacctttgtgcttcgagatctgcagaccagacagtactatgccaatcagaatggctcaaataccaagggaagtgttattggttctctaatgagatgaaaagctggagtgacagttatgtgtattgtttggaaagaaaatctcatctactaatcatacatgaccaacttgaaatggcttttatacagaaaaacctaagacaattaaactacgtatggattgggcttaactttacctccttgaaaatgacatggacttgggtggatggttctccaatagattcaaagatattcttcataaagggaccagctaaagaaaacagctgtgctgccattaaggaaagcaaaattttctctgaaacctgcagcagtgttttcaaatggatttgtcagtattagagtttgacaaaattcacagtgaaataatcaatgatcactatttttggcctattagtttctaatattaatctccaggtgtaagattttaaagtgcaattaaatgccaaaatctcttctcccttctccctccatcatcgacactggtctagcctcagagtaacccctgttaacaaactaaaatgtacacttcaaaatttttacgtgatagtataaaccaatgtgacttcatgtgatcatatccaggatttttattcgtcgcttattttatgccaaatgtgatcaaattatgcctgtttttctgtatcttgcgttttaaattcttaataaggtcctaaacaaaatttcttatatttctaatggttgaattataatgtgggtttatacattttttacccttttgtcaaagagaattaactttgtttccaggcttttgctactcttcactcagctacaataaacatcctgaatgttttcttaaaaaa

SEQ ID NO: 303 - DNA, 930 bp, Homo sapiens
  misc_feature: chromosome 1 open reading frame 33
ccgtcttccgccgcacgtggattcagcgcgatgcccaaatccaagcgcgacaagaaagtctccttaaccaaaactgccaagaaaggcttggaattgaaacaaaacctgatagaagagcttcggaaatgtgtggacacctacaagtaccttttcatcttctctgtggccaacatgaggaacagcaagctgaaggacatccggaacgcctggaagcacagccggatgttctttggcaaaaacaaggtgatgatggtggccttgggtcggagcccatctgatgaatacaaagacaacctgcaccaggtcagcaaaaccttgaggggtgaggtgggtctcctgttcaccaaccgcacaaaggaggaggtgaatgagtggttcacgaaatacacagaaatggactacgcccgagctggtaacaaagcagctttcactgtgagcctggatccagggcccctggagcagttcccccactccatggagccacagctcaggcagctgggcctgcccaccgccctcaagagaggtgtggtgactctgctgtctgactacgaggtgtgcaaggagggcgatgtgctgaccccagagcaggctcgcgtcctgaagctttttgggtatgagatggctgaattcaaggtgaccatcaaatacatgtgggattcacagtcgggaaggttccagcagatgggagacgacttgccagagagcgcatctgagtccacagaagagtcagactcagaagatgatgactgaaagggactcgggactgaaggtctcctggaagcttctgggtctcactggaccatcaggactgctgccgcccctctggagagagcagctttttatttgtctgtagacagggaacatgatgggcactgacctcctgtaaagaataaaactgtgggccgggcgcggtggaaaaaaaaaaaaaaa

SEQ ID NO: 304 - DNA, 3367 bp, Homo sapiens
  misc_feature: toll-like receptor 8
ctcctgcatagagggtaccattctgcgctgctgcaagttacggaatgaaaaattagaacaacagaaacgtggttctcttgacacttcagtgttagggaacatcagcaagacccatcccaggagaccttgaaggaagcctttgaaagggagaatgaaggagtcatctttgcaaaatagctcctgcagcctgggaaaggagactaaaaaggaaaacatgttccttcagtcgtcaatgctgacctgcattttcctgctaatatctggttcctgtgagttatgcgccgaagaaaatttttctagaagctatccttgtgatgagaaaaagcaaaatgactcagttattgcagagtgcagcaatcgtcgactacaggaagttccccaaacggtgggcaaatatgtgacagaactagacctgtctgataatttcatcacacacataacgaatgaatcatttcaagggctgcaaaatctcactaaaataaatctaaaccacaaccccaatgtacagcaccagaacggaaatcccggtatacaatcaaatggcttgaatatcacagacggggcattcctcaacctaaaaaacctaagggagttactgcttgaagacaaccagttaccccaaataccctctggtttgccagagtctttgacagaacttagtctaattcaaaacaatatatacaacataactaaagagggcatttcaagacttataaacttgaaaaatctctatttggcctggaactgctattttaacaaagtttgcgagaaaactaacatagaagatggagtatttgaaacgctgacaaatttggagttgctatcactatctttcaattctctttcacacgtgtcacccaaactgccaagctccctacgcaaactttttctgagcaacacccagatcaaatacattagtgaagaagatttcaagggattgataaatttaacattactagatttaagcgggaactgtccgaggtgcttcaatgccccatttccatgcgtgccttgtgatggtggtgcttcaattaatatagatcgttttgcttttcaaaacttgacccaacttcgatacctaaacctctctagcacttccctcaggaagattaatgctgcctggtttaaaaatatgcctcatctgaaggtgctggatcttgaattcaactatttagtgggagaaatagcctctggggcatttttaacgatgctgccccgcttagaaatacttgacttgtcttttaactatataaaggggagttatccacagcatattaatatttccagaaacttctctaaacctttgtctctacgggcattgcatttaagaggttatgtgttccaggaactcagagaagatgatttccagcccctgatgcagcttccaaacttatcgactatcaacttgggtattaattttattaagcaaatcgatttcaaacttttccaaaatttctccaatctggaaattatttacttgtcagaaaacagaatatcaccgttggtaaaagatacccggcagagttatgcaaatagttcctcttttcaacgtcatatccggaaacgacgctcaacagattttgagtttgacccacattcgaacttttatcatttcacccgtcctttaataaagccacaatgtgctgcttatggaaaagccttagatttaagcctcaacagtattttcttcattgggccaaaccaatttgaaaatcttcctgacattgcctgtttaaatctgtctgcaaatagcaatgctcaagtgttaagtggaactgaattttcagccattcctcatgtcaaatatttggatttgacaaacaatagactagactttgataatgctagtgctcttactgaattgtccgacttggaagttctagatctcagctataattcacactatttcagaatagcaggcgtaacacatcatctagaatttattcaaaatttcacaaatctaaaagttttaaacttgagccacaacaacatttatactttaacagataagtataacctggaaagcaagtccctggtagaattagttttcagtggcaatcgccttgacattttgtggaatgatgatgacaacaggtatatctccattttcaaaggtctcaagaatctgacacgtctggatttatcccttaataggctgaagcacatcccaaatgaagcattccttaatttgccagcgagtctcactgaactacatataaatgataatatgttaaagttttttaactggacattactccagcagtttcctcgtctcgagttgcttgacttacgtggaaacaaactactctttttaactgatagcctatctgactttacatcttcccttcggacactgctgctgagtcataacaggatttcccacctaccctctggctttctttctgaagtcagtagtctgaagcacctcgatttaagttccaatctgctaaaaacaatcaacaaatccgcacttgaaactaagaccaccaccaaattatctatgttggaactacacggaaacccctttgaatgcacctgtgacattggagatttccgaagatggatggatgaacatctgaatgtcaaaattcccagactggtagatgtcatttgtgccagtcctggggatcaaagagggaagagtattgtgagtctggagctaacaacttgtgtttcagatgtcactgcagtgatattatttttcttcacgttctttatcaccaccatggttatgttggctgccctggctcaccatttgttttactgggatgtttggtttatatataatgtgtgtttagctaagataaaaggctacaggtctctttccacatcccaaactttctatgatgcttacatttcttatgacaccaaagatgcctctgttactgactgggtgataaatgagctgcgctaccaccttgaagagagccgagacaaaaacgttctcctttgtctagaggagagggattgggacccgggattggccatcatcgacaacctcatgcagagcatcaaccaaagcaagaaaacagtatttgttttaaccaaaaaatatgcaaaaagctggaactttaaaacagctttttacttggctttgcagaggctaatggatgagaacatggatgtgattatatttatcctgctggagccagtgttacagcattctcagtatttgaggctacggcagcggatctgtaagagctccatcctccagtggcctgacaacccgaaggcagaaggcttgttttggcaaactctgagaaatgtggtcttgactgaaaatgattcacggtataacaatatgtatgtcgattccattaagcaatactaactgacgttaagtcatgatttcgcgccataataaaga

SEQ ID NO: 305 - DNA, 1552 bp, Homo sapiens
  misc_feature: N-acetylneuraminate pyruvate lyase (dihydrodipicolinate synthase) /// N-acetylneuraminate pyruvate lyase (dihydrodipicolinate synthase)
acttaatgggctcaaggtcacctacctgacctaccagcagctcaatggccttcccaaagaagaaacttcagggtcttgtggctgcaaccatcacgccaatgactgagaatggagaaatcaacttttcagtaattggtcagtatgtggattatcttgtgaaagaacagggagtgaagaacatttttgtgaatggcacaacaggagaaggcctgtccctgagcgtctcagagcgtcgccaggttgcagaggagtgggtgacaaaagggaaggacaagctggatcaggtgataattcacgtaggagcactgagcttgaaggagtcacaggaactggcccaacatgcagcagaaataggagctgatggcatcgctgtcattgcaccgttcttcctcaagccatggaccaaagatatcctgattaatttcctaaaggaagtggctgctgccgcccctgccctgccattttattactatcacattcctgccttgacaggggtaaagattcgtgctgaggagttgttggatgggattctggataagatccccaccttccaagggctgaaattcagtgatacagatctcttagacttcgggcaatgtgttgatcagaatcgccagcaacagtttgctttcctttttggggtggatgagcaactgttgagtgctctggtgatgggagcaactggagcagtgggcagtacctataactacctgggaaaaaagacaaaccagatgttggaggcttttgaacaaaaggacttctctttagccctgaactatcagttttgtatccagagatttatcaactttgttgtcaaactaggttttggagtgtcacagaccaaagccatcatgactctggtctctgggattccaatgggcccaccccggcttccactgcagaaagcctccagggagtttactgatagtgctgaagctaaactgaagagcctggatttcctttctttcactgatttaaaggatggaaacttggaagctggtagctagtgcctctctatcaaatcagggtttgcaccttgagacataatctaccttaaatagtgcatttttttctcagggaattttagatgaacttgaataaactctcctagcaaatgaaatctcacaataagcattgaggtaccttttgtgagccttaaaaagtcttattttgtgaaggggcaaaaactctaggagtcacaactctcagtcattcatttcacagatttttttgtggagaaatttctgtttatatggatgaaatggaatcaagaggaaaattgtaattgattaattccatctgtctttaggagctctcattatctcggtctctggttcctaatcctattttaaagttgtctaattttaaaccactataatatgtcttcattttaataaatattcatttggaatctaggaaaactctgagctactgcatttaggcaggcactttaataccaaactgtaacatgtctcaactgtatacaactcaaaatacaccagctcatttggctgctcagtctaactctagaatggatgcttttgaattcatt

SEQ ID NO: 306 - DNA, 765 bp, Homo sapiens
atggcctcagttccgaaaaccaacaaaatagaaccgcggtcctattccattattcctagctgcagtatcaggcggctcgggcctgctttgaacactccaatttttcaaagtaaacgcaacgggccccgcggacactcagcttacagcatcgaggggcgccagaggcaaggggcgggacgggcggtggtccctcgcgcggaccgcccgcccgctcccaagatccaactacgagctttttacctgcagcaactttactatacgctattggagctggaattaccgcggctgctggcaccagacttgccctccaatggctcctcgttaaaggatttaaagtggactcattccaattacagggcctcgaaagagtcctgtattgttattttcgtcactacctccccgggtcgggagtgggtaatttgcgcgcctgctgccttccttggatgtggtagcctccaggctccctctccggaatctgaaccctcattccccgtcacccgtggtcaccatggtcggcacggcgactaccatcgaaagttgatagggcagacgttcgaatgggtcgtcgtccgccgccacggggggcgtgcgatcggcccgaggttatctagagtcaccaaagccgccggcgcccgccccccggccggggccggagaggggctgagggttggttttgatctgataaatgcaccgatcccccccgcgaagggggtcagcgcccgtcggcatgtattagctctagaattaccacagttatccaagtag

SEQ ID NO: 307 - DNA, 360 bp, Homo sapiens
  misc_feature: chemokine (C-C motif) ligand 24
atggcaggcctgatgaccatagtaaccagccttctgttccttggtgtctgtgcccaccacatcatccctacgggctctgtggtcataccctctccctgctgcatgttctttgtttccaagagaattcctgagaaccgagtggtcagctaccagctgtccagcaggagcacatgcctcaagggaggagtgatcttcaccaccaagaagggccagcagttctgtggcgaccccaagcaggagtgggtccagaggtacatgaagaacctggacgccaagcagaagaaggcttcccctagggccagggcagtggctgtcaagggccctgtccagagatatcctggcaaccaaaccacctgctaa

SEQ ID NO: 308 - DNA, 1203 bp, Homo sapiens
  misc_feature: DNA replication complex GINS protein PSF2
ggaaaacggcggccgcggcgtctcctccgggacgctgaggggcccgaggagaccgtgaggctctggcctgcagctcgcgccgccatggacgctgccgaggtcgaattcctcgccgagaaggagctggttaccattatccccaacttcagtctggacaagatctacctcatcgggggggacctggggccttttaaccctggtttacccgtggaagtgcccctgtggctggcgattaacctgaaacaaagacagaaatgtcgcctgctccctccagagtggatggatgtagaaaagttggagaagatgagggatcatgaacgaaaggaagaaacttttaccccaatgcccagcccttactacatggaacttacgaagctcctgttaaatcatgcttcagacaacatcccgaaggcagacgaaatccggaccctggtcaaggatatgtgggacactcgtatagccaaactccgagtgtctgctgacagctttgtgagacagcaggaggcacatgccaagctggataacttgaccttgatggagatcaacaccagcgggactttcctcacacaagcgctcaaccacatgtacaaactccgcacaaacctccagcctctggagagtactcagtctcaggacttctagagaaaggcctggtgcaggcggcttgctgggggatgtgagcgctcaggacgtgatgaggtactcgtggttctggagctctagaaacacttctgatgcatgaaaaatgtgtgatggtgcaaggaatggattcaggatgttgttggagaaacaagtttgtgattagtccttaaaacttagctccctgggacattcttcaattccacatctgtttctagaaaccagccctttttccccccacttttgagaaataaaaaagccttaggtaaataagtcattctccctagcagagccacttgggtctcctgcatggaagccatcacacttgggcaggtgttcagtgactggtaggtgtagatacagcaggagtggccatgtggtccacggctttttaccccttcttgatcctcatttcttgggctgaatttagactctctcacagaggtggctcacagagaaggatggcagatggtgcagccaacaatgctgaccggtgcttatcctctaagccctgatccacaataaaaatggacccaactcaaaaaaaaaaaaaaaaaaaaaaaa

SEQ ID NO: 309 - DNA, 2527 bp, Homo sapiens
  misc_feature: tensin /// tensin
  misc_feature (26)..(27): n is a, c, g, or t
  misc_feature (147)..(147): n is a, c, g, or t
  misc_feature (561)..(561): n is a, c, g, or t
  misc_feature (628)..(629): n is a, c, g, or t
  misc_feature (656)..(656): n is a, c, g, or t
  misc_feature (1463)..(1464): n is a, c, g, or t
  misc_feature (1550)..(1550): n is a, c, g, or t
  misc_feature (1585)..(1585): n is a, c, g, or t
  misc_feature (1679)..(1679): n is a, c, g, or t
  misc_feature (1708)..(1708): n is a, c, g, or t
  misc_feature (1802)..(1802): n is a, c, g, or t
  misc_feature (1812)..(1812): n is a, c, g, or t
  misc_feature (1820)..(1820): n is a, c, g, or t
  misc_feature (1830)..(1830): n is a, c, g, or t
  misc_feature (1855)..(1855): n is a, c, g, or t
  misc_feature (1866)..(1866): n is a, c, g, or t
  misc_feature (1930)..(1930): n is a, c, g, or t
  misc_feature (1934)..(1934): n is a, c, g, or t
  misc_feature (2001)..(2001): n is a, c, g, or t
  misc_feature (2016)..(2016): n is a, c, g, or t
  misc_feature (2407)..(2407): n is a, c, g, or t
  misc_feature (2420)..(2420): n is a, c, g, or t
tttttttttttttttttttttttttnngagttttctttaactttatcatttataaagccatacaatgcattgcaaagaaacaaagcagctgtacaggagtggggacgcgtcagtgtacaatacattcatgtccaggataaggagcanacaccaggatttatacacggtggcagcggctataggcacgatgatacaaaatataaagtatatttccatctatataaatacacagctggggtggggaaggatgctgggtgatcttgtttcccccgcagagggcctgggaggcagggagggtggtgggaagggatttcttacatttgttctcaatgatgggtctgaagggaggagagaaatggggaaacacagcctgcacacactgatgtgctctcacacacacgcacaaacaaaacacagacacaggagagtttcaaacagcttaacactgattggaaaacaagcttgggacatccctctacagtaactccactgctggcaagagcccaggcgtgggatatgaacagaggtcctccaacattttggacatttgaggacagaggngccaagagggacagatctgcccgaggcccccaccctgcccctctgggtgaaccacttctcacctggnntatcgctgagactccaccaattggttngcctacaggcctcacctcccgactcccctcactgctgggcgacattgaatttgaagttccattgcccagcacctccaaccccgactcccaagttccctaaagaaatgagcaaaacacacgcacacacatacatccacacttgcacatgcgcacacacgtcctgtgttaccactggccaaggaaacgcgagtctcaggattccagggcctggacctggggtaaagggctgctctgggactctgccccccaacctcttggaggaccccgagtgtgggggcaggattgggtgtctgccttgactcacaggatctccccaggtcctaaagctgaaaaaaaaagtgggagaagatccaggaggcaggggtggtggacaaaagtaggagtgagactaaaaagtgggagtgagactagatttgatcacactcaccacccttctgtgccccctggacagcatgctcccctggagcccctgcacaggctcatcagaacaaggcagaatctcctactcactaacctcctgagagccgtttatagggggatcacacttgtccaggagggctgcccctcctgctttcacacaaccactggccccaccatccctctcctggccagtctcagaagacccagggatcctcaaaaaccaggggagaaggaatcctggccattggtgtccacagctttcagagctactggaggagacgctcagatgacatgggtcaaaggcctttcccaaacttaggatgtgatgtatctgtcccttaagcgcctggctaaataagagagccagaacaccgtgatagcaggctnnatcaaaccgctcacttcctccctgttttccttcgcaggtcccctctccattgttttctcgcccaatccttccctcttgctcccttngggaaaaagccacgtggagctcactgggcccctcnccccagctgaagggacatgaccctcctctgccctcttccctccagacacccagctggacagctggtggcagcacgggactgaacctgctggggntctgcgtcgctgcgatgtccatgactccntggctctttgttgcccatcttctcccagaccctttcccatcccagcccatgttcaaggccagacagcgctctcctggctgacacacagattcancaataaacancagtaaantagattcagngagggagaagacagaagaagataancatttacaaantaataattagtaaaagtgcttgcttttaaaggaaatctttggcaagaatatactgcagtgcggnagtnttgtgtgtgcgtaggtgtgtgcatgggtgcacagcccgccgtgacacagaagggctctggtgcaggncccagaggtggggcnactgtggggactggggaacccttccccatcattcgccttgaaaagtcacactctcagaaactgactccttccgcagggatgctgggagggagttaccagctttctggcatgaatgggtcctcccgcaggggcacacatggctcaggctggagtggaggggctggccatgcatgcaaggtgggctgtggtgggtggtgaggaagggaaaagcgaccgtgaaagctgaccccagactcagtcctgggccccagccaggctgcttgaagggtctgatacaccgcccagcctcaagtgtggacagaacatccatgccaggaataggctcctgggctctccagtgggagatgagatatttacaaaggaaggggatgggaaatatctcctatcttgnaagataattgggntttgctagggaatgaggagagggggaaacccagatatttggcttgaataacccagaaggaagagcactttggagggactttggtcaccaggcacaagtttcactctg

SEQ ID NO: 310 - DNA, 2335 bp, Homo sapiens
  misc_feature: Kruppel-like factor 4 (gut)
  misc_feature (652)..(652): n is a, c, g, or t
  misc_feature (757)..(757): n is a, c, g, or t
  misc_feature (759)..(759): n is a, c, g, or t
  misc_feature (789)..(789): n is a, c, g, or t
  misc_feature (890)..(890): n is a, c, g, or t
  misc_feature (938)..(938): n is a, c, g, or t
  misc_feature (1135)..(1135): n is a, c, g, or t
  misc_feature (1153)..(1153): n is a, c, g, or t
  misc_feature (1155)..(1161): n is a, c, g, or t
  misc_feature (1317)..(1317): n is a, c, g, or t
  misc_feature (1328)..(1328): n is a, c, g, or t
  misc_feature (1334)..(1334): n is a, c, g, or t
  misc_feature (1352)..(1352): n is a, c, g, or t
  misc_feature (1369)..(1370): n is a, c, g, or t
  misc_feature (1388)..(1388): n is a, c, g, or t
  misc_feature (1454)..(1454): n is a, c, g, or t
  misc_feature (1459)..(1459): n is a, c, g, or t
  misc_feature (1465)..(1465): n is a, c, g, or t
  misc_feature (1471)..(1471): n is a, c, g, or t
  misc_feature (1478)..(1478): n is a, c, g, or t
  misc_feature (1488)..(1488): n is a, c, g, or t
  misc_feature (1495)..(1495): n is a, c, g, or t
  misc_feature (1524)..(1524): n is a, c, g, or t
  misc_feature (1531)..(1531): n is a, c, g, or t
  misc_feature (1533)..(1533): n is a, c, g, or t
  misc_feature (1536)..(1536): n is a, c, g, or t
  misc_feature (1548)..(1548): n is a, c, g, or t
  misc_feature (1555)..(1555): n is a, c, g, or t
  misc_feature (1558)..(1558): n is a, c, g, or t
  misc_feature (1562)..(1562): n is a, c, g, or t
  misc_feature (1564)..(1564): n is a, c, g, or t
  misc_feature (1566)..(1566): n is a, c, g, or t
  misc_feature (1570)..(1570): n is a, c, g, or t
  misc_feature (1572)..(1572): n is a, c, g, or t
  misc_feature (1576)..(1576): n is a, c, g, or t
  misc_feature (1584)..(1584): n is a, c, g, or t
  misc_feature (1594)..(1594): n is a, c, g, or t
  misc_feature (1606)..(1606): n is a, c, g, or t
  misc_feature (1609)..(1609): n is a, c, g, or t
  misc_feature (1611)..(1611): n is a, c, g, or t
  misc_feature (1615)..(1615): n is a, c, g, or t
  misc_feature (1621)..(1621): n is a, c, g, or t
  misc_feature (1624)..(1624): n is a, c, g, or t
  misc_feature (1632)..(1632): n is a, c, g, or t
  misc_feature (1647)..(1651): n is a, c, g, or t
  misc_feature (1660)..(1660): n is a, c, g, or t
  misc_feature (1676)..(1676): n is a, c, g, or t
  misc_feature (1679)..(1679): n is a, c, g, or t
  misc_feature (1687)..(1687): n is a, c, g, or t
  misc_feature (1690)..(1691): n is a, c, g, or t
  misc_feature (1701)..(1701): n is a, c, g, or t
  misc_feature (1709)..(1709): n is a, c, g, or t
  misc_feature (1736)..(1736): n is a, c, g, or t
  misc_feature (1740)..(1740): n is a, c, g, or t
  misc_feature (1742)..(1744): n is a, c, g, or t
  misc_feature (1755)..(1755): n is a, c, g, or t
  misc_feature (1763)..(1764): n is a, c, g, or t
  misc_feature (1769)..(1770): n is a, c, g, or t
  misc_feature (1804)..(1808): n is a, c, g, or t
  misc_feature (1810)..(1810): n is a, c, g, or t
  misc_feature (1812)..(1812): n is a, c, g, or t
  misc_feature (1821)..(1821): n is a, c, g, or t
  misc_feature (1866)..(1866): n is a, c, g, or t
  misc_feature (1878)..(1878): n is a, c, g, or t
  misc_feature (1900)..(1900): n is a, c, g, or t
  misc_feature (2044)..(2044): n is a, c, g, or t
ttttttttttttttttcagataaaatattataggtttatttaaaacttaattctcaccttgagtatgcaaaatacaaactccacaaaatgttcattttactttgtagtttacaaatatacaaaatagacgtttgcttaaatttatattacatatttattaaggcaaggaactatatagaaaaacacatttgttctgcttaaggcatacttgggaataaaccattgtacaaattattgcacatctgaaaccacagtgcataacagactgtctgcataaaaatgctaaagaagtaaaccaggtatattacctgacttaggtcataaatgttgatcggaagacaaatatagattttccttgtcaaagtatgcagcagtttgaaaactttggcttccttgtttggtacctttagaaccaagactcaccaagcaccatcatttaggctatttaaacatgttttctgtacctgaatttcttcctcttcttctaacatcataataatggcttttagaaggtaaagagaatacaaggtgatcttttatgcttatattgcatcaatacacaattcaagggaattctggtcttccctcccccaactcacggatataatttataccctgatatccacaacttccagtcacccccttggcattntgtaagtccaggaatattcaagtcggatttgtcttttggattcctcatttttcctgattatccactcacaagatgactcagttgggaacttgaccatgattgtantnctttctggctgggctccttccctcatcggnaagacagtgtgaaaagtaaaaaatactgaattctcttctggcagtgtgggtcatatccactgtctgggatttaaaaatgcctcttcatgtgtaaggcgagntggtccgacctggaaaatgctcggtcgcatttttggcactggaacggncggtgccccgtgtgtttacggtagtgcctggtcagttcatctgagcgggcgaatttccatccacagccgtcccagtcacagtggtaaggtttctcacctgtgtgggttcgcaggtgtgccttgagatgggaactctttgtgtaggttttgccgcagcccgcgtaatcacaagtgtgggtggcggtccttttccgggnccacgatcgtcttccccncnnnnnnntgggctcctctggcatgcaggaaccgggtggcatgagctcttggtaatggagcggcgggacttgcggctgcatctgatcgggcaggaaggatgggtaattgggccccgggtggggatggaagccgggaggaagcggcagggcagggtgacagtccntgctgctcagnacttcntcaagacccagggtcggngtagtcctgctgggganntgccgccccagggggaantcgtgtgcagccgccggtggccattgctgagagggggtccagcgcccaagtgggtgcacgaagagnccgcntcctgnttgatnttggggnacgtgcgcgncggcccnccgttgtagggcgccaccaccaccgggtngctgccntnagngctgcctttgcngacgctnatnaccnangngctncngtantcgctgcnaggggcgctnagcgacgccttnagnangaanttgccnatnagcccgcnacctggcggctgcgnnnnnctgctgcgncggaatgtacaccggntcnaattctgnccnnaggagctcgnccacgaanccgcccgaggggctcacgtcgttgatntccncnnngttgaaggganccgtcggnnggggnncggactccctgccatagaggaggcctccgcccgnnnnncncngcgccacgnccgggtcgttcccggcccggatcggataggtgaagctgcaggtgnagggcgcgctgncagggccgctgctcgacggcgncgacgaagaggaggctgacgctgacgaggacacggtggcggccactgactccggaggatgggtcagcgaattggagagaataaagtccaggtccaggagatcgttgaactcctcggtctctctccgaggtaggggcgccaggtngctaccgccgcaagccgcaccggctccgccgctctccaggtctgtggccacggtcgccgccgccaggtcataggggcggccgggaagcactgggggaagtcgcttcatgtgggagagctcctcccgccagcgctgcggggacagggcgggagagacctgtcagtggtggtcccctgttgccacccgacatactgacgtgctggcgggccacgcgcgactgcaccgcccagacatggggactggtcaggcaggaagcacccgggaacccagggcgccagcgctgctatctcc

SEQ ID NO: 311 - DNA, 1555 bp, Homo sapiens
  misc_feature: lung type-I cell membrane-associated glycoprotein
  misc_feature (47)..(47): n is a, c, g, or t
  misc_feature (132)..(132): n is a, c, g, or t
  misc_feature (188)..(189): n is a, c, g, or t
  misc_feature (193)..(193): n is a, c, g, or t
  misc_feature (340)..(340): n is a, c, g, or t
  misc_feature (593)..(594): n is a, c, g, or t
  misc_feature (649)..(649): n is a, c, g, or t
  misc_feature (675)..(675): n is a, c, g, or t
  misc_feature (680)..(680): n is a, c, g, or t
  misc_feature (685)..(685): n is a, c, g, or t
  misc_feature (767)..(767): n is a, c, g, or t
  misc_feature (837)..(837): n is a, c, g, or t
  misc_feature (1352)..(1352): n is a, c, g, or t
ctttttttttttttttttttttttttttttttttttgtacacaatcnatttgttttatttgaaaacatgtctacactgcattgagcaccaacacaggtgtgaccaagaaacccacagtcctgtccccgcagncactgggtccagtgtatgacttggggtggactgttatttttcacagtgaggggggnngaanggataggaaagaaaagatggccattatcccaactcctgttcaggaatctgaacaatgaaagttatttaaactcatccagctcttctcattccccttctctcaatcagctggtgttcaaatatggaatctgaggccgagcgcagtggncacacgcctgtaatcccagcactttgggaggccgaggcgggcagatcacgaggtcaagagatagagatcatcctcgccgatacggtgaaaccccatctctactaaaaatacaaaaattggccgggtgtggtggtaggaacctgtagtcccagctactcaggaggctgaggcaggagaattgctttttgacatcctgacacatgtataattgccgggaggcagagttgcagactacgtttcacacacacacacnnaaaaaatggaatctgagctggtggggccagctggatttgggaacacacagacacnctgtttaaaataacatccagacatcnttgcnaaaantgggaggaatgggctgtgcttccgaatgatagtttactttttcctgttttatgaatgcttacaaatttagaggataccaganttgcacaaccgccatcatgacagagcatctgctcagtgtaaaaactttgtttaggaaaaaaaaaaaaaantccaatggatatatgggaagagaagtgccaggctggatggtgctgagacagaatgaccccttgggctcctttattttgttcttttcaacaggaccccacagatatttgcggtatgtcatgaggactggggatgtcttctatttttaaatcaggtatttagtcaagctgcttttaatattaagactgtacaaattgatttttgttccctgtatctttcctcagaggcagaaagtgaatgttataaaactggcagattttatttctcataccagaggctcacacaggatttctttctgcatgggggacaactggctcttggtttcaaacacacttgagcctctagcaccattaagcatccagcagcttcctcggcatccaggctgagatatccatattccagaacaaagcagccaatgtgaaggatgtgcatcactgggaagagagaaggctgcccccttagccctggctcctcatcatctgagggaagtggagggggcaggtgggagcaagcttanagtcaccaagtcatggctggagaaggatttgggtaaagcaactctagaggctgcctggtggcctacttgggagaaacaaagtgcctttgagactatcgacttcctgcttgtgatctaaaatggatgtctttgaaatgattaatctggaccagctaaaggcagttgttcaccacgtgttatccaagtttagatttcctagttga

SEQ ID NO: 312 - DNA, 664 bp, Homo sapiens
  misc_feature: Rac GTPase activating protein 1
  misc_feature (281)..(281): n is a, c, g, or t
  misc_feature (287)..(287): n is a, c, g, or t
  misc_feature (292)..(292): n is a, c, g, or t
  misc_feature (295)..(295): n is a, c, g, or t
  misc_feature (319)..(319): n is a, c, g, or t
  misc_feature (330)..(330): n is a, c, g, or t
  misc_feature (385)..(385): n is a, c, g, or t
  misc_feature (388)..(388): n is a, c, g, or t
  misc_feature (392)..(392): n is a, c, g, or t
attcggcacagggaggatttaggatgcctccttctaagaaccagaagttctcattccccattatgaactgagctataatatggagctttcataaaaatgggatgcattgaggacagaactagtgatgggagtatgcgtacattgatttggatgattaggtctttaatagtgttgagtggcacaaccttgtaaatgtgaaagtacaactcgtatttatctctgatgtgccgctgctgaactttgggttcatttggggtcaaagccagtttttcttttaaaanttgaanttcantcntgatgcttggcccccatacccccnaaccttgtccnagtggagcccaacttctaaaggtcaatatatcatcctttggcatcccaactaacnatnaagnagtaggctataagggaagattgtcaatattttgtggtaagaaaagctacagtcattttttctttgcactttggatgctgaaatttttcccatggaacatagccacatctagatagatgtgagctttttcttctgttaaaattattcttaatgtctgtaaaaacgattttcttctgtagaatgtttgacttcgtattgacccttatctgtaaaacacctatttgggataatatttggaaaaaaagtaaatagctttttcaaaatgaaaaaaaa

SEQ ID NO: 313 - DNA, 507 bp, Homo sapiens
  misc_feature: aquaporin 3
  misc_feature (13)..(13): n is a, c, g, or t
  misc_feature (421)..(421): n is a, c, g, or t
  misc_feature (423)..(428): n is a, c, g, or t
  misc_feature (430)..(431): n is a, c, g, or t
  misc_feature (449)..(449): n is a, c, g, or t
  misc_feature (451)..(461): n is a, c, g, or t
  misc_feature (464)..(465): n is a, c, g, or t
  misc_feature (468)..(468): n is a, c, g, or t
  misc_feature (491)..(491): n is a, c, g, or t
ttttttttttttngaggttttaggcacatatttattttattttttttaatataaaagtaaaagagtacattgttgagtagaggattaaaggagtgacgaccctttctaaagtggggtctcccatcccggatccctaagactgtaacatctgctacatacattaaaaacaaaacaaaacaaaagcaaacatgaaacttatgacctgacttcactccacccttcatgcctgcattatgacagaaacacgtcccactgctcctacttatgtatgtacatccagagctccaaacctaagctgtggccccctcctcccagccctacccacatccaccctacttcccaaaagcctgtagaagcccccacttagaaaaaaaggcagacatacacatacacagaaacacatatctatctgcagctcctncnnnnnnannccctgaaacatacacacncnnnnnnnnnnntcnnctncttatggcacagatgggacaggntggcctttcccctgtt

SEQ ID NO: 314 - DNA, 799 bp, Homo sapiens
  misc_feature: ribokinase
  misc_feature (116)..(120): n is a, c, g, or t
  misc_feature (123)..(127): n is a, c, g, or t
  misc_feature (129)..(131): n is a, c, g, or t
  misc_feature (194)..(194): n is a, c, g, or t
  misc_feature (600)..(614): n is a, c, g, or t
  misc_feature (658)..(728): n is a, c, g, or t
  misc_feature (731)..(731): n is a, c, g, or t
  misc_feature (733)..(737): n is a, c, g, or t
  misc_feature (739)..(739): n is a, c, g, or t
  misc_feature (741)..(741): n is a, c, g, or t
  misc_feature (743)..(745): n is a, c, g, or t
  misc_feature (748)..(748): n is a, c, g, or t
tatttgtggagggaattgtatttaagtttgtacagatcttggttgtggaatctttaattctggttgttttgtgcaaatgcatggaaagcaaaagaatcatcgttataaataaattnnnnnttnnnnntnnnttcgtaaaagaactaatatttgcaaagaaaggggacgaggacattttctaataagcattagcnaggagcagccacccccaagtacattttattcccaggtatatttattttgggactaatagcaatcaaaacagagtaagcggaaggtcttttttgtaagggtaagatgactgtgttcctgcagcctggacactgactgctgcaatgaaattggatctgttgagcatgtcttccaaggacagatttggatagtaagccaggtagaaggccagagctcccacaaagctgtcaccagcacccgtggtatccacagccttgactttctctgtgggaatgtgctttggctcaggttctgtctgtgacagcaccacacatccttcagcccctaaggtaatgattaccacctggcagccccttttcaagagcactaatgcagcctccccagcatctgcagcgctgcccaccgtgnnnnnnnnnnnnnnntcagcctcactttcattgcagcagaacacatctgagagggtgtnnnnnnnnnnnnnnnnnnnnnnnnnnnnnnnnnnnnnnnnnnnnnnnnnnnnnnnnnnnnnnnnnnnnnnnatngnnnnngntncnnnagnagttgctggagttatttcgagctggcagaccatgactttggctctgctaat

SEQ ID NO: 315 - DNA, 841 bp, Homo sapiens; identical to SEQ ID NO: 10
  misc_feature: interferon, alpha-inducible protein (clone IFI-6-16)

1-9. (canceled)

10. A nucleic acid array of comprising at least 4 distinct nucleic acid sequences selected from the group consisting of the polynucleotides listed in any one of Gene Tables I, V, VI, VII or Table IV, immobilized on a surface at discrete and known positions, wherein said nucleic acids hybridize to nucleic acids in a sample of a subject that are either up-regulated or down-regulated in response to inhibition of IMPDH.

11-13. (canceled)

14. The nucleic acid array of claim 10, wherein the surface is selected from the group consisting of a metal, silicon, a polymer plastic, paper, ceramic, quartz, gallium arsenide, metal, metalloid, cellulose, celluose acetate, nitrocellulose, and a glass.

15. (canceled)

16. The nucleic acid array of claim 10, further comprising at least one control spot consisting of one or more nucleic acids that are known not to be modulated with IMPDH inhibition.

17. (canceled)

18. The nucleic acid array of claim 10, wherein said surface comprises a plurality of microarrays separated from each other with a hydrophobic polymer strip.

19. (canceled)

20. A set of polynucleotides for use in the detection of IMPDH inhibition, wherein said polynucleotides hybridize to 4 to 314 genes selected from the group consisting of the genes set forth in any one or more of Gene Table I, Gene Table II, Gene Table III, Gene Table IV, Gene Table V, Gene Table VI, Gene Table VII and Gene Table VIII wherein the expression of each said polynucleotides is either up- or down-regulated in response to inhibition of IMPDH.

21-26. (canceled)

27. A method for predicting whether a candidate IMPDH inhibitory agent will produce a therapeutic effect in a subject comprising: contacting a biological sample from said subject with said candidate IMPDH inhibitory agent and determining the expression level in said biological sample of four or more prognostic genes selected from the group consisting of the genes set forth in one or more of Gene Table I, Gene Table II, Gene Table III, Gene Table IV, Gene Table V, Gene Table VI, Gene Table VII and Gene Table VIII, wherein a modulation of the expression level of the four or more of genes is similar to the modulation resulting from contacting the biological sample with VX-944 and is indicative that said agent is a therapeutically effective IMPDH inhibitory agent.

28-29. (canceled)

30. The method of claim 27, wherein said subject is human.

31. The method of claim 27, wherein said biological sample is a sample from a cancer patient, and wherein said cancer is selected from the group consisting of breast cancer, ovarian cancer, gastric cancer, colorectal cancer, prostate cancer, pancreatic cancer, and lung cancer.

32. The method of claim 27, wherein the modulation of expression in response to said candidate IMPDH inhibitory agent is similar to the modulation in expression seen in response to contacting said biological sample with VX-944.

33. The method of claim 27, wherein said biological sample is a tissue sample comprising cancer cells.

34. The method of claim 27, wherein said tissue is fixed, paraffin-embedded, fresh, or frozen.

35. The method of claim 34, where the tissue is from a biopsy.

36. (canceled)

37. The method of claim 27, wherein the expression level of said prognostic genes is determined by PCR, immunohistochemistry or in situ hybridization.

38-39. (canceled)

40. The method of claim 27, wherein the assay for the measurement of said prognostic genes or their expression products is provided in the form of a kit or kits.

41. A method of preparing a prognostic profile for a subject's response to an IMPDH inhibitor comprising the steps of:
(a) exposing ex vivo cells of said subject to an IMPDH inhibitor;
(b) subjecting RNA extracted from the cells of step (a) to gene expression profiling;
(c) determining the expression levels of at least four genes selected from the group consisting of the genes set forth in one or more of Gene Table I, Gene Table II, Gene Table III, Gene Table IV, Gene Table V, Gene Table VI, Gene Table VII and Gene Table VIII in said cells; and
(d) comparing the expression levels obtained in step (c) to expression levels obtained in the absence of said IMPDH inhibitor, wherein a modulation of the expression level of said four or more of genes in response to said IMPDH inhibitor indicates that said subject is likely to be responsive to said inhibitor.

42. A method of preparing a prognostic profile for a subject's response to an IMPDH inhibitor comprising the steps of:
(a) administering an IMPDH inhibitor to said subject;
(b) subjecting RNA extracted from cells of said subject to gene expression profiling;
(c) determining the expression level of at least four genes selected from the group consisting of the genes set forth in one or more of Gene Table I, Gene Table II, Gene Table III, Gene Table IV, Gene Table V, Gene Table VI, Gene Table VII and Gene Table VIII in said cells of said subject; and
(d) comparing the expression levels obtained in step (c) to expression levels obtained in the absence of said IMPDH inhibitor, wherein a modulation of the expression level of said four or more of genes in response to said IMPDH inhibitor administration indicates that said IMPDH inhibitor will likely predict the subject's response to said IMPDH inhibitor administration.

43. (canceled)

44. The method of claim 41 or 42 wherein said cells are cancer cells obtained from said subject.

45. The method of claim 44, wherein said cancer cells are selected from the group consisting of breast cancer cells, ovarian cancer cells, hematological cancer cells, gastric cancer cells, colorectal cancer cells, pancreatic cancer cells, and lung cancer cells.

46-48. (canceled)

49. The method of claim 41 or 42 wherein said expression profile is compiled into a report that includes recommendation for a treatment for said subject with an IMPDH inhibitor.

50. The method of claim 41 or 42 wherein if altered expression of one or more of the genes selected from the genes set forth in Gene Tables 1, II, III, IV, V, VI, VII, and VIII, or a corresponding expression product is determined, said report includes a prediction that said subject is a suitable candidate for IMPDH inhibition-based therapy.

51. The method of claim 42, further comprising the step of treating said patient with an IMPDH inhibitory agent.

52. The method of claim 42, wherein the IMPDH inhibitory agent is identified according to the method of claim 27.

53-55. (canceled)
